(19) United States
(12) Patent Application Publication
(10) Pub. No.: US 2019/0042695 A1
(43) Pub. Date: Feb. 7, 2019

(54) METHOD FOR DIFFERENTIATING CONTRACTION OF ESOPHAGEAL BASALOID CARCINOMA

(71) Applicants: Fukushima Medical University, Fukushima (JP); Nippon Gene Co., Ltd., Tokyo (JP); Medicrome, Inc., Fukushima (JP)

(72) Inventors: Shinya WATANABE, Fukushima (JP); Jun-ichi IMAI, Fukushima (JP); Emi ITO, Fukushima (JP); Gaku MORISAWA, Fukushima (JP); Takeshi TADA, Fukushima (JP); Mitsukazu GOTO, Fukushima (JP); Michihiko KOGURE, Fukushima (JP); Reiko TOGASHI, Tokyo (JP); Akira NISHIKAWA, Tokyo (JP); Susumu MATSUKURA, Kanagawa (JP)

(21) Appl. No.: 16/074,817

(22) PCT Filed: Feb. 10, 2017
(86) PCT No.: PCT/JP2017/004870

§ 371 Date: Sep. 4, 2018

(30) Foreign Application Priority Data
Feb. 10, 2016 (JP) 2016-024129

(51) Int. Cl. G06F 19/22; G06F 19/24; G06F 19/20; G06F 19/12

(52) U.S. Cl. CPC G06F 19/22; G06F 19/24; C12Q 1/6869; G06F 19/12; G06F 19/20

(57) ABSTRACT

A method for readily and accurately differentiating an esophageal cancer patient's tumor between basaloid squamous cell carcinoma of the esophagus or another esophageal cancer is developed and provided. A method is provided for assisting differentiating contraction of basaloid squamous cell carcinoma of the esophagus, including measuring the expression levels of markers for basaloid squamous cell carcinoma of the esophagus in samples collected from a test subject and a healthy subject or a group of healthy subjects and determining whether the test subject is highly likely to be affected with basaloid squamous cell carcinoma of the esophagus based on the obtained measurement values.

### TECHNICAL FIELD

[0001] The present invention relates to a marker for basaloid squamous cell carcinoma of the esophagus and a method for differentiating the presence of basaloid squamous cell carcinoma of the esophagus using the same.

### BACKGROUND ART

[0002] Basaloid squamous cell carcinoma (BSC) is a tumor in the laryngeal pharynx region which was first reported by Wain et al. (Non Patent Literature 1). In addition to the laryngeal pharynx region, the development of the tumor in the esophagus, lung, anus, uterine cervix, penis, urinary bladder, etc. has been reported.

[0003] Basaloid squamous cell carcinoma of the esophagus (hereinafter often referred to as “BSCE”) is a relatively rarecancer which is classified into special histopathologic type esophageal cancers excluding esophageal squamous cell carcinoma and esophageal adenocarcinoma among esophageal cancers. Reportedly, BSCE accounts for 1.0% to 8.7% in Japan (Non Patent Literature 2 to 11) and 0.4% to 11.3% in foreign countries (Non Patent Literature 12 to 20) with respect to all esophageal cancers. Histopathological characteristics of BSCE are noted as solid nest with comedo-type necrosis, cribriform pattern and pseudoacini formation, ductal differentiation, small nests with a microcystic and/or trabecular pattern, hyaline-like material deposition, coexistence of invasive SCC component, etc. However, since BSCE has various histological types, it is usually difficult to provide a differential diagnosis. In particular, it is necessary to correctly differentiate BSCE from adenoid cystic carcinoma, small cell carcinoma, poorly differentiated squamous cell carcinoma, and adenosquamous carcinoma. In addition, it is said that making a diagnosis of BSCE by preoperative endoscopic biopsy is very difficult, resulting in a diagnostic accuracy rate of only 0% to 10%. In the past, there have been reports about a BSCE diagnosis by immunostaining (Non Patent Literature 3, 6, 10, 12, 14, and 15) and PCR (Non Patent Literature 21 or 22). However, specificity was not shown in either case.

[0004] The prognosis of BSCE is still controversial. Meanwhile, it is said that proliferative capacity and the cytological malignancy of BSCE are higher than those of esophageal squamous cell carcinoma. It has also been reported that progressive BSCE has poor prognosis (Non Patent Literature 23). It is considered necessary to establish a new multidisciplinary therapy, in addition to surgery and radiation therapy, in order to improve the prognosis. However, due to the rarity and difficulty of preoperative diagnosis of BSCE, no characteristic therapy can be selected. At present, BSCE is treated in accordance with the treatment for a common type of esophageal squamous cell carcinoma.

[0005] Therefore, although it is indispensable to improve the preoperative diagnostic accuracy of BSCE, the existing methods cannot solve the above problems. There is a demand for the establishment of a BSCE diagnosis method with high accuracy.

### CITATION LIST

### Non Patent Literature

[0006] Non Patent Literature 1: Wain S. L., et al., 1986, Hum Pathol 17:1158-66
[0007] Non Patent Literature 2: Takubo K., et al., 1991, ActaPathologica Japonica 41:59-64
[0008] Non Patent Literature 3: Abe K., et al., 1996, American Journal of Surgical Pathology 20:453-461
[0009] Non Patent Literature 4: Koide N., et al., 1997, Surgery Today 27:685-691
[0010] Non Patent Literature 5: Kawahara K., et al., 2001, Report of a case. Surgery Today 31:655-659
[0011] Non Patent Literature 6: Ohashi K., et al., 2003, Pathology Research and Practice 199:713-721
[0012] Non Patent Literature 7: Yoshioka S., et al., 2004, Japanese Journal of Gastroenterological Surgery 37:290-295
[0013] Non Patent Literature 8: Kobayashi Y., et al., 2009, Diseases of the Esophagus 22:231-238
[0014] Non Patent Literature 9: Saito S., et al., 2009, Esophagus 6:177-181
[0015] Non Patent Literature 10: Imamhasan A., et al., 2012, Human Pathology 43:2012-2023
[0016] Non Patent Literature 11: Tachimori Y., et al., 2008, Esophagus 12:130-157
[0017] Non Patent Literature 12: Sarbia M., et al., 1997, Cancer 79:1871-1878
[0018] Non Patent Literature 13: Zhang X. H., et al., 1998, World Journal of Gastroenterology 4:397-403
[0019] Non Patent Literature 14: Cho K. J., et al., 2000, Histopathology 36:331-340
[0020] Non Patent Literature 15: Huang Z., et al., 2001, Chinese medical journal 114:1084-1088
[0021] Non Patent Literature 16: Lam K. Y., et al., 2001, Journal of Pathology 195:435-442
[0022] Non Patent Literature 17: Klaase J. M., et al., 2003, Annals of Surgical Oncology 10:261-267
[0023] Non Patent Literature 18: Li T. J., et al., 2004, Archives of Pathology and Laboratory Medicine 128:1124-1130
[0024] Non Patent Literature 19: Chen S. B., et al., 2012, Journal of Cancer Research and Clinical Oncology 138:1165-1171
[0025] Non Patent Literature 20: Zhang B. H., et al., 2013, Asian Pacific Journal of Cancer Prevention 14:1889-1894
[0026] Non Patent Literature 21: Sarbia M., et al., 1999, American Journal of Pathology 155:1027-1032
[0027] Non Patent Literature 22: Bellizzi A. M., et al., 2009, American Journal of Surgical Pathology 33:1608-1614
[0028] Non Patent Literature 23: Arai T., et al., 2011, Esophagus 8:169-177

### SUMMARY OF INVENTION

### Technical Problem

[0029] An object of the present invention is to develop and provide a method for readily and accurately differentiating an esophageal cancer patient's tumor between BSCE or another esophageal cancer.

### Solution to Problem

[0030] In order to attain the above object, the present inventors obtained gene expression profiles for cancer tissues and normal tissues excised from a plurality of esophageal cancer patients using a comprehensive gene expression analysis technique and found a group of 70 kinds of genes having expression levels that significantly differ between BSCE and other esophageal cancers or normal sites. Accordingly, the present inventors developed a method whereby it is possible to readily and accurately differentiate BSCE from other esophageal cancers by determining the expression levels of the above genes in samples from test subjects and healthy subjects. The present invention is based on the above findings. The following are provided.

[0031] (1) A method for assisting differentiating contraction of basaloid squamous cell carcinoma of the esophagus, comprising:

[0032] a measurement step of measuring expression levels of 5 kinds of genes comprising nucleotide sequences shown in SEQ ID NOs: 141 to 145, respectively, per unit amount of samples collected from a test subject and a healthy subject or a group of healthy subjects, thereby obtaining measurement values thereof;

[0033] a calculation step of, based on the measurement values obtained in the measurement step, calculating expression ratios for each gene based on the measurement values of the test subject and the healthy subject or the group of healthy subjects, thereby obtaining a sum of the expression ratios, or calculating an average measurement value from the respective measurement values of all of the genes measured in the measurement step for the group of test subjects and for the group of healthy subjects; and

[0034] a determination step of, based on the values obtained in the calculation step, determining that the test subject is highly likely to be affected with basaloid squamous cell carcinoma of the esophagus in a case in which the sum exceed a given cutoff value resulting from an ROC curve, or in a case in which the average measurement value of the group of test subjects is statistically significantly larger than the average measurement value of the group of healthy subjects.

[0035] (2) The method according to (1), wherein the genes comprising the nucleotide sequences shown in SEQ ID NOs: 141 to 145 encode the proteins consisting of the amino acid sequences shown in SEQ ID NOs: 71 to 75, respectively.

[0036] (3) The method according to (2), wherein the genes encoding the proteins consisting of the amino acid sequences shown in SEQ ID NOs: 71 to 75 consist of the nucleotide sequences shown in SEQ ID NOs: 1 to 5, respectively.

[0037] (4) The method according to any one of (1) to (3), wherein the measurement step further comprises measuring the expression level per unit amount for one or more genes comprising the nucleotide sequences shown in SEQ ID NOs: 146 to 148, respectively.

[0038] (5) The method according to (4), wherein the genes comprising the nucleotide sequences shown in SEQ ID NOs: 146 to 148 encode the proteins consisting of the amino acid sequences shown in SEQ ID NOs: 76 to 78, respectively.

[0039] (6) The method according to (5), wherein the genes encoding the proteins consisting of the amino acid sequences shown in SEQ ID NOs: 76 to 78 consist of the nucleotide sequences shown in SEQ ID NOs: 6 to 8, respectively.

[0040] (7) The method according to any one of (1) to (6), wherein the measurement step further comprises measuring the expression level per unit amount of one or more genes comprising the nucleotide sequences shown in SEQ ID NOs: 149 to 153, respectively.

[0041] (8) The method according to (7), wherein the genes comprising the nucleotide sequences shown in SEQ ID NOs: 149 to 153 encode the proteins consisting of the amino acid sequences shown in SEQ ID NOs: 79 to 83, respectively.

[0042] (9) The method according to (8), wherein the genes encoding the proteins consisting of the amino acid sequences shown in SEQ ID NOs: 79 to 83 consist of the nucleotide sequences shown in SEQ ID NOs: 9 to 13, respectively.

[0043] (10) The method according to any one of (1) to (9), wherein the measurement step further comprises measuring the expression level per unit amount of one or more genes comprising the nucleotide sequences shown in SEQ ID NOs: 154 to 210, respectively.

[0044] (11) The method according to (10), wherein the genes comprising the nucleotide sequences shown in SEQ ID NOs: 154 to 210 encode the proteins consisting of the amino acid sequences shown in SEQ ID NOs: 84 to 140, respectively.

[0045] (12) The method according to (11), wherein the genes encoding the proteins consisting of the amino acid sequences shown in SEQ ID NOs: 84 to 140 consist of the nucleotide sequences shown in SEQ ID NOs: 14 to 70, respectively.

[0046] (13) The method according to any one of (1) to (12), wherein the expression level of the gene per unit amount is measured as an absolute amount or a relative amount of mRNA of the gene or a nucleotide fragment thereof or a protein encoded by the gene or a peptide fragment thereof per unit amount.

[0047] (14) The method according to any one of (1) to (13), wherein in the determination step the average measurement value of the group of test subjects is twice or more than the average measurement value of the group of healthy subjects.

[0048] (15) A BSCE marker wherein said marker consists of a group of 5 kinds of genes comprising the nucleotide sequences shown in SEQ ID NOs: 141 to 145, respectively.

[0049] (16) The BSCE marker according to (15), wherein the 5 kinds of genes encode the proteins consisting of the amino acid sequences shown in SEQ ID NOs: 71 to 75, respectively.

[0050] (17) The BSCE marker according to (16), wherein the genes encoding the proteins consisting of the amino acid sequences shown in SEQ ID NOs: 71 to 75 consist of the nucleotide sequences shown in SEQ ID NOs: 1 to 5, respectively.

[0051] (18) The BSCE marker according to any one of (15) to (17), wherein said marker consists of the group of genes further comprising one or more genes comprising the nucleotide sequences shown in SEQ ID NOs: 146 to 148, respectively.

[0052] (19) The BSCE marker according to (18), wherein the genes comprising the nucleotide sequences shown in SEQ ID NOs: 146 to 148 encode the proteins consisting of the amino acid sequences shown in SEQ ID NOs: 76 to 78, respectively.

[0053] (20) The BSCE marker according to (19), wherein the genes encoding the proteins consisting of the amino acid sequences shown in SEQ ID NOs: 76 to 78 consist of the nucleotide sequences shown in SEQ ID NOs: 6 to 8, respectively.

[0054] (21) The BSCE marker according to any one of (15) to (20), wherein said marker consists of the group of genes further comprising one or more genes comprising the nucleotide sequences shown in SEQ ID NOs: 149 to 153, respectively.

[0055] (22) The BSCE marker according to (21), wherein the genes comprising the nucleotide sequences shown in SEQ ID NOs: 149 to 153 encode the proteins consisting of the amino acid sequences shown in SEQ ID NOs: 79 to 83, respectively.

[0056] (23) The BSCE marker according to (22), wherein the genes encoding the proteins consisting of the amino acid sequences shown in SEQ ID NOs: 79 to 83 consist of the nucleotide sequences shown in SEQ ID NOs: 9 to 13, respectively.

[0057] (24) The BSCE marker according to any one of (15) to (23), wherein said marker consists of the group of genes further comprising one or more genes comprising the nucleotide sequences shown in SEQ ID NOs: 154 to 210, respectively.

[0058] (25) The BSCE marker according to (24), wherein the genes comprising the nucleotide sequences shown in SEQ ID NOs: 154 to 210 encode the proteins consisting of the amino acid sequences shown in SEQ ID NOs: 84 to 140, respectively.

[0059] (26) The BSCE marker according to (25), wherein the genes encoding the proteins consisting of the amino acid sequences shown in SEQ ID NOs: 84 to 140 consist of the nucleotide sequences shown in SEQ ID NOs: 14 to 70, respectively.

[0060] (27) A reagent for detecting BSCE, wherein said reagent contains a group of probes consisting of nucleotide sequences shown in SEQ ID NOs: 141 to 145.

[0061] (28) The reagent for detecting BSCE according to (27), wherein said reagent further contains one or more probes consisting of nucleotide sequences shown in SEQ ID NOs: 146 to 148.

[0062] (29) The reagent for detecting BSCE according to (27) or (28), wherein said reagent further contains one or more probes consisting of nucleotide sequences shown in SEQ ID NOs: 149 to 153.

[0063] (30) The reagent for detecting BSCE according to any one of (27) to (29), wherein said reagent further contains one or more probes consisting of nucleotide sequences shown in SEQ ID NOs: 154 to 210.

[0064] (31) A kit for detecting BSCE, wherein said kit contains the reagent for detecting BSCE according to any one of (27) to (30).

[0065] The present specification incorporates the contents disclosed in Japanese Patent Application No. 2016-024129, to which the present application claims priority.

### Advantageous Effects of Invention

[0066] According to the method for differentiating contraction of BSCE using the BSCE marker of the present invention, it is possible to correctly differentiate a tumor of an esophageal cancer patient as BSCE or other esophageal cancer.

### BRIEF DESCRIPTION OF DRAWINGS

[0067] FIG. 1 shows the results of classification by cluster analysis based on the expression profiles of the group of 70 kinds of genes for differentiating BSCE (BSCE markers) of the present invention. The dendrogram in the top was created according to the non-similarity coefficient based on the gene expression patterns of 70 kinds of BSCE markers, and the bar in the middle indicates distinctions of cancer types of individual specimens (including normal tissues). In addition, the diagram (hereinafter referred to as “heat map chart”) in the bottom show gene expression patterns.

[0068] FIG. 2-1 (A) shows an ROC curve of 70 kinds of BSCE markers. The vertical axis represents “sensitivity” and the horizontal axis represents “1-specificity” (the same applies hereinafter to figures showing ROC curves). FIG. 2-1 (B) shows a sensitivity-specificity curve obtained with the use of BSCE markers of 70 genes. The vertical axis represents “sensitivity” or “specificity” and the horizontal axis represents the sum of logarithmic transformed relative expression ratios of the 70 kinds of BSCE markers (expression scores of 70 genes).

[0069] FIG. 2-2 (C) shows a heat map chart obtained by aligning the specimens in the ascending order of the expression scores of 70 genes in each specimen (middle) and a graph plotting the values of the expression scores of 70 genes (bottom). The vertical line in the figure represents a cutoff value. In addition, of two bars in the top, the upper bar denoted by “Cancer type” indicates distinctions of cancer types (including normal tissues) and the lower bar denoted by “Basaloid” indicates distinction between BSCE and non-BSCE (colored portions correspond to BSCE).

[0070] FIG. 2-3 (D) shows an ROC curve created by combining the expression scores of 70 genes for 57 surgical specimens and the expression scores of 70 genes for 312 biopsy specimens obtained in Example 1. FIG. 2-3 (E) shows a sensitivity-specificity curve from 57 surgical specimens and 312 biopsy specimens obtained with the use of the 70 kinds of BSCE markers. The vertical axis represents “sensitivity” or “specificity” and the horizontal axis represents the “expression scores of 70 genes.”

[0071] FIG. 2-4 (F) shows a heat map chart obtained by aligning 312 biopsy specimens and 57 surgical specimens together in the ascending order of the expression scores of 70 genes (middle) and a graph plotting the values of the expression scores of 70 genes (bottom). The vertical line in the figure indicates a cutoff value. In addition, of three bars in the top, the first bar denoted by “Cancer type” indicates distinctions of cancer types (including normal tissues), the second bar denoted by “Basaloid” indicates distinction between BSCE and non-BSCE (colored portions correspond to BSCE), and the third bar denoted by “Biopsy; Surgery” indicates distinction between surgical specimens and biopsy specimens.

[0072] FIG. 2-5 (G) shows an ROC curve created by combining the expression scores of 70 genes for 57 surgical specimens and the expression scores of 70 genes for 20 FFPE tissue specimens. FIG. 2-5 (H) shows a sensitivity-specificity curve from 57 surgical specimens and 20 FFPE tissue specimens obtained with the use of the 70 kinds of BSCE markers. The vertical axis represents “sensitivity” or “specificity” and the horizontal axis represents the “expression score of 70 genes.”

[0073] FIG. 2-6 (I) shows a heat map chart obtained by aligning 20 FFPE tissue specimens and 57 surgical specimens together in the ascending order of the expression scores of 70 genes (middle) and a graph plotting the values of the expression scores of 70 genes (bottom). The vertical line in the figure represents a cutoff value. In addition, of four bars in the top, the top bar denoted by “Cancer type” indicates distinctions of cancer types (including normal tissues), the second bar denoted by “Diagnosis at Fukushima Medical University” indicates distinctions of cancer types as a result of pathological diagnosis of FFPE tissue specimens at Fukushima Medical University, the third bar denoted by “Basaloid” indicates distinction between BSCE and non-BSCE (colored portions correspond to BSCE), and the bottom bar denoted by “FFPE; Surgery” indicates distinction between surgical specimens and FFPE tissue specimens.

[0074] FIG. 2-7 (J) is a group scatter diagram according to the expression scores of 70 genes for BSCE markers when surgical specimens, biopsy specimens, and FFPE tissue specimens are all combined. In the figure, the horizontal line with an asterisk represents an average value (the same applies to the figures described below).

[0075] FIG. 2-8 (K) is a group scatter diagram created separately for each specimen type.

[0076] FIG. 3-1 (A) shows an ROC curve created according to the expression scores of 5 genes (the sum of logarithmic transformed relative expression ratios of 5 kinds of BSCE markers) from 57 surgical specimens obtained in Example 1 regarding 5 kinds of BSCE markers represented by NOs: R-1 to R-5 in Table 1. FIG. 3-1 (B) shows a sensitivity-specificity curve from 57 surgical specimens obtained with the use of the 5 kinds of BSCE markers. The vertical axis represents “sensitivity” or “specificity” and the horizontal axis represents “the sum of logarithmic transformed relative expression ratios of the 5 kinds of BSCE markers (expression scores of 5 genes).”

[0077] FIG. 3-2 (C) shows an ROC curve created from the expression scores of 5 genes for 57 surgical specimens and 312 biopsy specimens obtained in Example 1 regarding 5 kinds of BSCE markers represented by NOs: R-1 to R-5. FIG. 3-2 (D) shows a sensitivity-specificity curve from 57 surgical specimens and 312 biopsy specimens obtained with the use of the 5 kinds of BSCE markers. The vertical axis represents “sensitivity” or “specificity” and the horizontal axis represents the “expression scores of 5 genes.”

[0078] FIG. 3-3 (E) shows an ROC curve created from the expression scores of 5 genes for 57 surgical specimens and 20 FFPE tissue specimens obtained in Example 1 regarding 5 kinds of BSCE markers represented by NOs: R-1 to R-5. FIG. 3-3 (F) shows a sensitivity-specificity curve from 57 surgical specimens and 20 FFPE tissue specimens obtained with the use of the 5 kinds of BSCE markers. The vertical axis represents “sensitivity” or “specificity” and the horizontal axis represents the “expression scores of 5 genes.”

[0079] FIG. 3-4 (G) shows a heat map chart obtained by re-aligning 57 surgical specimens obtained in Example 1 in the ascending order of the expression scores of 5 genes (middle) and a graph plotting the values of the expression scores of 5 genes (bottom) regarding the expression scores of 5 genes for 5 kinds of BSCE markers represented by NOs: R-1 to R-5. The vertical line in the figure represents a cutoff value. In addition, of two bars in the top, the upper bar denoted by “Cancer type” indicates distinctions of cancer types (including normal tissues) and the lower bar denoted by “Basaloid” indicates distinction between BSCE and non-BSCE (colored portions correspond to BSCE).

[0080] FIG. 3-5 (H) shows a heat map chart obtained by re-aligning 57 surgical specimens and 312 biopsy specimens obtained in Example 1 in the ascending order of the expression scores of 5 genes (middle) and a graph plotting the values of the expression scores of 5 genes (bottom) regarding the expression scores of 5 genes for 5 kinds of BSCE markers represented by NOs: R-1 to R-5. The vertical line in the figure represents a cutoff value. In addition, of three bars in the top, the first bar denoted by “Cancer type” indicates distinctions of cancer types (including normal tissues), the second bar denoted by “Basaloid” indicates distinction between BSCE and non-BSCE (colored portions correspond to BSCE), and the third bar denoted by “Biopsy; Surgery” indicates distinction between surgical specimens and biopsy specimens.

[0081] FIG. 3-6 (I) shows a heat map chart obtained by re-aligning 57 surgical specimens and 20 FFPE tissue specimens obtained in Example 1 in the ascending order of the expression scores of 5 genes (middle) and a graph plotting the values of the expression scores of 5 genes (bottom) regarding the expression scores of 5 genes for 5 kinds of BSCE markers represented by NOs: R-1 to R-5. The vertical line in the figure represents a cutoff value. In addition, of four bars in the top, the top bar denoted by “Cancer type” indicates distinctions of cancer types (including normal tissues), the second bar denoted by “Diagnosis at Fukushima Medical University” indicates distinctions of cancer types as a result of pathological diagnosis of FFPE tissue specimens at Fukushima Medical University, the third bar denoted by “Basaloid” indicates distinction between BSCE and non-BSCE (colored portions correspond to BSCE), and the bottom bar denoted by “FFPE; Surgery” indicates distinction between surgical specimens and FFPE tissue specimens.

[0082] FIG. 3-7 (J) is a group scatter diagram for all analyzed specimens obtained using the expression scores of 5 genes for 5 kinds of BSCE markers represented by NOs: R-1 to R-5 when surgical specimens, biopsy specimens, and FFPE tissue specimens are all combined.

[0083] FIG. 3-8 (K) is a group scatter diagram created separately for each specimen type.

[0084] FIG. 4-1 (A) shows an ROC curve created from the expression scores of 8 genes (the sum of logarithmic transformed relative expression ratios of 8 kinds of BSCE markers) for 57 surgical specimens obtained in Example 1 regarding 8 kinds of BSCE markers represented by NOs: R-1 to R-8 in Table 1. FIG. 4-1 (B) shows a sensitivity-specificity curve from 57 surgical specimens obtained with the use of the 8 kinds of BSCE markers. The vertical axis represents “sensitivity” or “specificity” and the horizontal axis represents “the sum of logarithmic transformed relative expression ratios of the 8 kinds of BSCE markers (expression scores of 8 genes).”

[0085] FIG. 4-2 (C) shows an ROC curve created from the expression scores of 8 genes for 57 surgical specimens and 312 biopsy specimens obtained in Example 1 regarding 8 kinds of BSCE markers represented by NOs: R-1 to R-8. FIG. 4-2 (D) shows a sensitivity-specificity curve from 57 surgical specimens and 312 biopsy specimens obtained with the use of the 8 kinds of BSCE markers. The vertical axis represents “sensitivity” or “specificity” and the horizontal axis represents the “expression scores of 8 genes.”

[0086] FIG. 4-3 (E) shows an ROC curve created from the expression scores of 8 genes for 57 surgical specimens and 20 FFPE tissue specimens obtained in Example 1 regarding 8 kinds of BSCE markers represented by NOs: R-1 to R-8. FIG. 4-3 (F) shows a sensitivity-specificity curve from 57 surgical specimens and 20 FFPE tissue specimens obtained with the use of the 8 kinds of BSCE markers. The vertical axis represents “sensitivity” or “specificity” and the horizontal axis represents the “expression scores of 8 genes.”

[0087] FIG. 4-4 (G) shows a heat map chart obtained by re-aligning 57 surgical specimens obtained in Example 1 in the ascending order of the expression scores of 8 genes (middle) and a graph plotting the values of the expression scores of 8 genes (bottom) regarding the expression scores of 8 genes for 8 kinds of BSCE markers represented by NOs: R-1 to R-8. The vertical line in the figure represents a cutoff value. In addition, of two bars in the top, the upper bar denoted by “Cancer type” indicates distinctions of cancer types (including normal tissues) and the lower bar denoted by “Basaloid” indicates distinction between BSCE and non-BSCE (colored portions correspond to BSCE).

[0088] FIG. 4-5 (H) shows a heat map chart obtained by re-aligning 57 surgical specimens and 312 biopsy specimens obtained in Example 1 in the ascending order of the expression scores of 8 genes (middle) and a graph plotting the values of the expression scores of 8 genes (bottom) regarding the expression scores of 8 genes for 8 kinds of BSCE markers represented by NOs: R-1 to R-8. The vertical line in the figure represents a cutoff value. In addition, of three bars in the top, the first bar denoted by “Cancer type” indicates distinctions of cancer types (including normal tissues), the second bar denoted by “Basaloid” indicates distinction between BSCE and non-BSCE (colored portions correspond to BSCE), and the third bar denoted by “Biopsy; Surgery” indicates distinction between surgical specimens and biopsy specimens.

[0089] FIG. 4-6 (I) shows a heat map chart obtained by re-aligning 57 surgical specimens and 20 FFPE tissue specimens obtained in Example 1 in the ascending order of the expression scores of 8 genes (middle) and a graph plotting the values of the expression scores of 8 genes (bottom) regarding the expression scores of 8 genes for 8 kinds of BSCE markers represented by NOs: R-1 to R-8. The vertical line in the figure represents a cutoff value. In addition, of four bars in the top, the top bar denoted by “Cancer type” indicates distinctions of cancer types (including normal tissues), the second bar denoted by “Diagnosis at Fukushima Medical University” indicates distinctions of cancer types as a result of pathological diagnosis of FFPE tissue specimens at Fukushima Medical University, the third bar denoted by “Basaloid” indicates distinction between BSCE and non-BSCE (colored portions correspond to BSCE), and the bottom bar denoted by “FFPE; Surgery” indicates distinction between surgical specimens and FFPE tissue specimens.

[0090] FIG. 4-7 (J) is a group scatter diagram for all analyzed specimens obtained using the expression scores of 8 genes for 8 kinds of BSCE markers represented by NOs: R-1 to R-8 when surgical specimens, biopsy specimens, and FFPE tissue specimens are all combined.

[0091] FIG. 4-8 (K) is a group scatter diagram created separately for each specimen type.

[0092] FIG. 5-1 (A) shows an ROC curve created from the expression scores of 10 genes (the sum of logarithmic transformed relative expression ratios of 10 kinds of BSCE markers represented by NOs: R-1 to R-5 and NOs: R-9 to R-13) for 57 surgical specimens obtained in Example 1 regarding 10 kinds of BSCE markers represented by NOs: R-1 to R-5 and NOs: R-9 to R-13 in Table 1. FIG. 5-1 (B) shows a sensitivity-specificity curve from 57 surgical specimens obtained with the use of the 10 kinds of BSCE markers. The vertical axis represents “sensitivity” or “specificity” and the horizontal axis represents the sum of logarithmic transformed relative expression ratios of the 10 kinds of BSCE markers (expression scores of 10 genes).

[0093] FIG. 5-2 (C) shows an ROC curve created from the expression scores of 10 genes for 57 surgical specimens and 312 biopsy specimens obtained in Example 1 regarding 10 kinds of BSCE markers represented by NOs: R-1 to R-5 and NOs: R-9 to R-13. FIG. 5-2 (D) shows a sensitivity-specificity curve from 57 surgical specimens and 312 biopsy specimens obtained with the use of the 10 kinds of BSCE markers. The vertical axis represents “sensitivity” or “specificity” and the horizontal axis represents the “expression scores of 10 genes.”

[0094] FIG. 5-3 (E) shows an ROC curve created from the expression scores of 10 genes for 57 surgical specimens and 20 FFPE tissue specimens obtained in Example 1 regarding 10 kinds of BSCE markers represented by NOs: R-1 to R-5 and NOs: R-9 to R-13.

[0095] FIG. 5-3 (F) shows a sensitivity-specificity curve from 57 surgical specimens and 20 FFPE tissue specimens obtained with the use of the 10 kinds of BSCE markers. The vertical axis represents “sensitivity” or “specificity” and the horizontal axis represents the “expression scores of 10 genes.”

[0096] FIG. 5-4 (G) shows a heat map chart obtained by re-aligning 57 surgical specimens obtained in Example 1 in the ascending order of the expression scores of 10 genes (middle) and a graph plotting the values of the expression scores of 10 genes (bottom) regarding the expression scores of 10 genes for 10 kinds of BSCE markers represented by NOs: R-1 to R-5 and NOs: R-9 to R-13. The vertical line in the figure represents a cutoff value. In addition, of two bars in the top, the upper bar denoted by “Cancer type” indicates distinctions of cancer types (including normal tissues) and the lower bar denoted by “Basaloid” indicates distinction between BSCE and non-BSCE (colored portions correspond to BSCE).

[0097] FIG. 5-5 (H) shows a heat map chart obtained by re-aligning 57 surgical specimens and 312 biopsy specimens obtained in Example 1 in the ascending order of the expression scores of 10 genes (middle) and a graph plotting the values of the expression scores of 10 genes (bottom) regarding the expression scores of 10 genes for 10 kinds of BSCE markers represented by NOs: R-1 to R-5 and NOs: R-9 to R-13. The vertical line in the figure represents a cutoff value. In addition, of three bars in the top, the first bar denoted by “Cancer type” indicates distinctions of cancer types (including normal tissues), the second bar denoted by “Basaloid” indicates distinction between BSCE and non-BSCE (colored portions correspond to BSCE), and the third bar denoted by “Biopsy; Surgery” indicates distinction between surgical specimens and biopsy specimens.

[0098] FIG. 5-6 (I) shows a heat map chart obtained by re-aligning 57 surgical specimens and 20 FFPE tissue specimens obtained in Example 1 in the ascending order of the expression scores of 10 genes (middle) and a graph plotting the values of the expression scores of 10 genes (bottom) regarding the expression scores of 10 genes for 10 kinds of BSCE markers represented by NOs: R-1 to R-5 and NOs: R-9 to R-13. The vertical line in the figure represents a cutoff value. In addition, of four bars in the top, the top bar denoted by “Cancer type” indicates distinctions of cancer types (including normal tissues), the second bar denoted by “Diagnosis at Fukushima Medical University” indicates distinctions of cancer types as a result of pathological diagnosis of FFPE tissue specimens at Fukushima Medical University, the third bar denoted by “Basaloid” indicates distinction between BSCE and non-BSCE (colored portions correspond to BSCE), and the bottom bar denoted by “FFPE; Surgery” indicates distinction between surgical specimens and FFPE tissue specimens.

[0099] FIG. 5-7 (J) is a group scatter diagram for all analyzed specimens obtained using the expression scores of 10 genes for 10 kinds of BSCE markers represented by NOs: R-1 to R-5 and NOs: R-9 to R-13 when surgical specimens, biopsy specimens, and FFPE tissue specimens are all combined.

[0100] FIG. 5-8 (K) is a group scatter diagram created separately for each specimen type.

[0101] FIG. 6-1 (A) shows an ROC curve created from the expression scores of 13 genes (the sum of logarithmic transformed relative expression ratios of 13 kinds of BSCE markers) for 57 surgical specimens obtained in Example 1 regarding 13 kinds of BSCE markers represented by NOs: R-1 to R-13 in Table 1. FIG. 6-1 (B) shows a sensitivity-specificity curve from 57 surgical specimens obtained with the use of the 13 kinds of BSCE markers. The vertical axis represents “sensitivity” or “specificity” and the horizontal axis represents “the sum of logarithmic transformed relative expression ratios of the 13 kinds of BSCE markers (expression scores of 13 genes).”

[0102] FIG. 6-2 (C) shows an ROC curve created from the expression scores of 13 genes for 57 surgical specimens and 312 biopsy specimens obtained in Example 1 regarding 13 kinds of BSCE markers represented by NOs: R-1 to R-13. FIG. 6-2 (D) shows a sensitivity-specificity curve from 57 surgical specimens and 312 biopsy specimens obtained with the use of the 13 kinds of BSCE markers. The vertical axis represents “sensitivity” or “specificity” and the horizontal axis represents the “expression scores of 13 genes.”

[0103] FIG. 6-3 (E) shows an ROC curve created from the expression scores of 13 genes for 57 surgical specimens and the expression scores of 13 genes for 20 FFPE tissue specimens obtained in Example 1 regarding 13 kinds of BSCE markers represented by NOs: R-1 to R-13. FIG. 6-3 (F) shows a sensitivity-specificity curve from 57 surgical specimens and 20 FFPE tissue specimens obtained with the use of the 13 kinds of BSCE markers. The vertical axis represents “sensitivity” or “specificity” and the horizontal axis represents the “expression scores of 13 genes.”

[0104] FIG. 6-4 (G) shows a heat map chart obtained by re-aligning 57 surgical specimens obtained in Example 1 in the ascending order of the expression scores of 13 genes (middle) and a graph plotting the values of the expression scores of 13 genes (bottom) regarding the expression scores of 13 genes for 13 kinds of BSCE markers represented by NOs: R-1 to R-13. The vertical line in the figure represents a cutoff value. In addition, of two bars in the top, the upper bar denoted by “Cancer type” indicates distinctions of cancer types (including normal tissues) and the lower bar denoted by “Basaloid” indicates distinction between BSCE and non-BSCE (colored portions correspond to BSCE).

[0105] FIG. 6-5 (H) shows a heat map chart obtained by re-aligning 57 surgical specimens and 312 biopsy specimens obtained in Example 1 in the ascending order of the expression scores of 13 genes (middle) and a graph plotting the values of the expression scores of 13 genes (bottom) regarding the expression scores of 13 genes for 13 kinds of BSCE markers represented by NOs: R-1 to R-13. The vertical line in the figure represents a cutoff value. In addition, of three bars in the top, the first bar denoted by “Cancer type” indicates distinctions of cancer types (including normal tissues), the second bar denoted by “Basaloid” indicates distinction between BSCE and non-BSCE (colored portions correspond to BSCE), and the third bar denoted by “Biopsy; Surgery” indicates distinction between surgical specimens and biopsy specimens.

[0106] FIG. 6-6 (I) shows a heat map chart obtained by re-aligning 57 surgical specimens and 20 FFPE tissue specimens obtained in Example 1 in the ascending order of the expression scores of 13 genes (middle) and a graph plotting the values of the expression scores of 13 genes (bottom) regarding the expression scores of 13 genes for 13 kinds of BSCE markers represented by NOs: R-1 to R-13. The vertical line in the figure represents a cutoff value. In addition, of four bars in the top, the top bar denoted by “Cancer type” indicates distinctions of cancer types (including normal tissues), the second bar denoted by “Diagnosis at Fukushima Medical University” indicates distinctions of cancer types as a result of pathological diagnosis of FFPE tissue specimens at Fukushima Medical University, the third bar denoted by “Basaloid” indicates distinction between BSCE and non-BSCE (colored portions correspond to BSCE), and the bottom bar denoted by “FFPE; Surgery” indicates distinction between surgical specimens and FFPE tissue specimens.

[0107] FIG. 6-7 (J) is a group scatter diagram for all analyzed specimens obtained using the expression scores of 13 genes for 13 kinds of BSCE markers represented by NOs: R-1 to R-13 when surgical specimens, biopsy specimens, and FFPE tissue specimens are all combined.

[0108] FIG. 6-8 (K) is a group scatter diagram created separately for each specimen type.

[0109] FIG. 7-1 (A) shows an ROC curve created from the expression scores of 7 genes (the sum of logarithmic transformed relative expression ratios of 7 kinds of BSCE markers) for 57 surgical specimens obtained in Example 1 regarding 7 kinds of BSCE markers represented by NOs: R-1 to R-5 and NOs: R-14 and R-15 in Table 1. FIG. 7-1 (B) shows a sensitivity-specificity curve from 57 surgical specimens obtained with the use of the 7 kinds of BSCE markers. The vertical axis represents “sensitivity” or “specificity” and the horizontal axis represents “the sum of logarithmic transformed relative expression ratios of the 7 kinds of BSCE markers (expression scores of 7 genes).”

[0110] FIG. 7-2 (C) shows an ROC curve created from the expression scores of 7 genes for 57 surgical specimens and 312 biopsy specimens obtained in Example 1 regarding 7 kinds of BSCE markers represented by NOs: R-1 to R-5 and NOs: R-14 and R-15. FIG. 7-2 (D) shows a sensitivity-specificity curve from 57 surgical specimens and 312 biopsy specimens obtained with the use of the 7 kinds of BSCE markers. The vertical axis represents “sensitivity” or “specificity” and the horizontal axis represents the “expression scores of 7 genes.”

[0111] FIG. 7-3 (E) shows an ROC curve created from the expression scores of 7 genes for 57 surgical specimens and 20 FFPE tissue specimens obtained in Example 1 regarding 7 kinds of BSCE markers represented by NOs: R-1 to R-5 and NOs: R-14 and R-15. FIG. 7-3 (F) shows a sensitivity-specificity curve from 57 surgical specimens and 20 FFPE tissue specimens obtained with the use of 7 kinds of BSCE markers. The vertical axis represents “sensitivity” or “specificity” and the horizontal axis represents the “expression scores of 7 genes.”

[0112] FIG. 7-4 (G) shows a heat map chart obtained by re-aligning 57 surgical specimens obtained in Example 1 in the ascending order of the expression scores of 7 genes (middle) and a graph plotting the values of the expression scores of 7 genes (bottom) regarding the expression scores of 7 genes for 7 kinds of BSCE markers represented by NOs: R-1 to R-5 and NOs: R-14 and R-15. The vertical line in the figure represents a cutoff value. In addition, of two bars in the top, the upper bar denoted by “Cancer type” indicates distinctions of cancer types (including normal tissues) and the lower bar denoted by “Basaloid” indicates distinction between BSCE and non-BSCE (colored portions correspond to BSCE).

[0113] FIG. 7-5 (H) shows a heat map chart obtained by re-aligning 57 surgical specimens and 312 biopsy specimens obtained in Example 1 in the ascending order of the expression scores of 7 genes (middle) and a graph plotting the values of the expression scores of 7 genes (bottom) regarding the expression scores of 7 genes for 7 kinds of BSCE markers represented by NOs: R-1 to R-5 and NOs: R-14 and R-15. The vertical line in the figure represents a cutoff value. In addition, of three bars in the top, the first bar denoted by “Cancer type” indicates distinctions of cancer types (including normal tissues), the second bar denoted by “Basaloid” indicates distinction between BSCE and non-BSCE (colored portions correspond to BSCE), and the third bar denoted by “Biopsy; Surgery” indicates distinction between surgical specimens and biopsy specimens.

[0114] FIG. 7-6 (I) shows a heat map chart obtained re-aligning 57 surgical specimens and 20 FFPE tissue specimens obtained in Example 1 in the ascending order of the expression scores of 7 genes (middle) and a graph plotting the values of the expression scores of 7 genes (bottom) regarding the expression scores of 7 genes for 7 kinds of BSCE markers represented by NOs: R-1 to R-5 and NOs: R-14 and R-15. The vertical line in the figure represents a cutoff value. In addition, of four bars in the top, the top bar denoted by “Cancer type” indicates distinctions of cancer types (including normal tissues), the second bar denoted by “Diagnosis at Fukushima Medical University” indicates distinctions of cancer types as a result of pathological diagnosis of FFPE tissue specimens at Fukushima Medical University, the third bar denoted by “Basaloid” indicates distinction between BSCE and non-BSCE (colored portions correspond to BSCE), and the bottom bar denoted by “FFPE; Surgery” indicates distinction between surgical specimens and FFPE tissue specimens.

[0115] FIG. 7-7 (J) is a group scatter diagram for all analyzed specimens obtained using the expression scores of 7 genes for 7 kinds of BSCE markers represented by NOs: R-1 to R-5 and NOs: R-14 and R-15 when surgical specimens, biopsy specimens, and FFPE tissue specimens are all combined.

[0116] FIG. 7-8 (K) is a group scatter diagram created separately for each specimen type.

[0117] FIG. 8-1 (A) shows an ROC curve created from the expression scores of 10′ genes (the sum of logarithmic transformed relative expression ratios of 10 kinds of BSCE markers represented by NOs: R-1 to R-8 and NOs: R-14 and R-15) for 57 surgical specimens obtained in Example 1 regarding 10 kinds of BSCE markers represented by NOs: R-1 to R-8 and NOs: R-14 and R-15 in Table 1. FIG. 8-1 (B) shows a sensitivity-specificity curve from 57 surgical specimens obtained with the use of the 10 kinds of BSCE markers. The vertical axis represents “sensitivity” or “specificity” and the horizontal axis represents “the sum of logarithmic transformed relative expression ratios of the 10 kinds of BSCE markers (expression scores of 10′ genes).”

[0118] FIG. 8-2 (C) shows an ROC curve created from the expression scores of 10′ genes for 57 surgical specimens and 312 biopsy specimens obtained in Example 1 regarding 10 kinds of BSCE markers represented by NOs: R-1 to R-8 and NOs: R-14 and R-15. FIG. 8-2 (D) shows a sensitivity-specificity curve from 57 surgical specimens and 312 biopsy specimens obtained with the use of the 10 kinds of BSCE markers. The vertical axis represents “sensitivity” or “specificity” and the horizontal axis represents the “expression scores of 10′ genes.”

[0119] FIG. 8-3 (E) shows an ROC curve created from the expression scores of 10′ genes for 57 surgical specimens and 20 FFPE tissue specimens obtained in Example 1 regarding 10 kinds of BSCE markers represented by NOs: R-1 to R-8 and NOs: R-14 and R-15.

[0120] FIG. 8-3 (F) shows a sensitivity-specificity curve from 57 surgical specimens and 20 FFPE tissue specimens obtained with the use of 10 kinds of BSCE markers. The vertical axis represents “sensitivity” or “specificity” and the horizontal axis represents the “expression scores of 10′ genes.”

[0121] FIG. 8-4 (G) shows a heat map chart obtained by re-aligning 57 surgical specimens obtained in Example 1 in the ascending order of the expression scores of 10′ genes (middle) and a graph plotting the values of the expression scores of 10′ genes (bottom) regarding the expression scores of 10′ genes for 10 kinds of BSCE markers represented by NOs: R-1 to R-8 and NOs: R-14 and R-15. The vertical line in the figure represents a cutoff value. In addition, of two bars in the top, the upper bar denoted by “Cancer type” indicates distinctions of cancer types (including normal tissues) and the lower bar denoted by “Basaloid” indicates distinction between BSCE and non-BSCE (colored portions correspond to BSCE).

[0122] FIG. 8-5 (H) shows a heat map chart obtained by re-aligning 57 surgical specimens and 312 biopsy specimens obtained in Example 1 in the ascending order of the expression scores of 10′ genes (middle) and a graph plotting the values of the expression scores of 10′ genes (bottom) regarding the expression scores of 10′ genes for 10 kinds of BSCE markers represented by NOs: R-1 to R-8 and NOs: R-14 and R-15. The vertical line in the figure represents a cutoff value. In addition, of three bars in the top, the first bar denoted by “Cancer type” indicates distinctions of cancer types (including normal tissues), the second bar denoted by “Basaloid” indicates distinction between BSCE and non-BSCE (colored portions correspond to BSCE), and the third bar denoted by “Biopsy; Surgery” indicates distinction between surgical specimens and biopsy specimens.

[0123] FIG. 8-6 (I) shows a heat map chart obtained by re-aligning 57 surgical specimens and 20 FFPE tissue specimens obtained in Example 1 in the ascending order of the expression scores of 10′ genes (middle) and a graph plotting the values of the expression scores of 10′ genes (bottom) regarding the expression scores of 10′ genes for 10 kinds of BSCE markers represented by NOs: R-1 to R-8 and NOs: R-14 and R-15. The vertical line in the figure represents a cutoff value. In addition, of four bars in the top, the top bar denoted by “Cancer type” indicates distinctions of cancer types (including normal tissues), the second bar denoted by “Diagnosis at Fukushima Medical University” indicates distinctions of cancer types as a result of pathological diagnosis of FFPE tissue specimens at Fukushima Medical University, the third bar denoted by “Basaloid” indicates distinction between BSCE and non-BSCE (colored portions correspond to BSCE), and the bottom bar denoted by “FFPE; Surgery” indicates distinction between surgical specimens and FFPE tissue specimens.

[0124] FIG. 8-7 (J) is a group scatter diagram for all analyzed specimens obtained using the expression scores of 10′ genes for 10 kinds of BSCE markers represented by NOs: R-1 to R-8 and NOs: R-14 and R-15 when surgical specimens, biopsy specimens, and FFPE tissue specimens are all combined.

[0125] FIG. 8-8 (K) is a group scatter diagram created separately for each specimen type.

[0126] FIG. 9-1 (A) shows an ROC curve created from the expression scores of 12 genes (the sum of logarithmic transformed relative expression ratios of 12 kinds of BSCE markers) for 57 surgical specimens obtained in Example 1 regarding 12 kinds of BSCE markers represented by NOs: R-1 to R-5 and NOs: R-9 to R-15 in Table 1. FIG. 9-1 (B) shows a sensitivity-specificity curve from 57 surgical specimens obtained with the use of the 12 kinds of BSCE markers. The vertical axis represents “sensitivity” or “specificity” and the horizontal axis represents “the sum of logarithmic transformed relative expression ratios of the 12 kinds of BSCE markers (expression scores of 12 genes).”

[0127] FIG. 9-2 (C) shows an ROC curve created from the expression scores of 12 genes for 57 surgical specimens and 312 biopsy specimens obtained in Example 1 regarding 12 kinds of BSCE markers represented by NOs: R-1 to R-5 and NOs: R-9 to R-15. FIG. 9-2 (D) shows a sensitivity-specificity curve from 57 surgical specimens and 312 biopsy specimens obtained with the use of the 12 kinds of BSCE markers. The vertical axis represents “sensitivity” or “specificity” and the horizontal axis represents the “expression scores of 12 genes.”

[0128] FIG. 9-3 (E) shows an ROC curve created from the expression scores of 12 genes for 57 surgical specimens and 20 FFPE tissue specimens obtained in Example 1 regarding 12 kinds of BSCE markers represented by NOs: R-1 to R-5 and NOs: R-9 to R-15.

[0129] FIG. 9-3 (F) shows a sensitivity-specificity curve from 57 surgical specimens and 20 FFPE tissue specimens obtained with the use of the 12 kinds of BSCE markers. The vertical axis represents “sensitivity” or “specificity” and the horizontal axis represents the “expression scores of 12 genes.”

[0130] FIG. 9-4 (G) shows a heat map chart obtained by re-aligning 57 surgical specimens obtained in Example 1 in the ascending order of the expression scores of 12 genes (middle) and a graph plotting the values of the expression scores (bottom) regarding the expression scores of 12 genes for 12 kinds of BSCE markers represented by NOs: R-1 to R-5 and NOs: R-9 to R-15. The vertical line in the figure represents a cutoff value. In addition, of two bars in the top, the upper bar denoted by “Cancer type” indicates distinctions of cancer types (including normal tissues) and the lower bar denoted by “Basaloid” indicates distinction between BSCE and non-BSCE (colored portions correspond to BSCE).

[0131] FIG. 9-5 (H) shows a heat map chart obtained by re-aligning 57 surgical specimens and 312 biopsy specimens obtained in Example 1 in the ascending order of the expression scores of 12 genes (middle) and a graph plotting the values of the expression scores (bottom) regarding the expression scores of 12 genes for 12 kinds of BSCE markers represented by NOs: R-1 to R-5 and NOs: R-9 to R-15. The vertical line in the figure represents a cutoff value. In addition, of three bars in the top, the first bar denoted by “Cancer type” indicates distinctions of cancer types (including normal tissues), the second bar denoted by “Basaloid” indicates distinction between BSCE and non-BSCE (colored portions correspond to BSCE), and the third bar denoted by “Biopsy; Surgery” indicates distinction between surgical specimens and biopsy specimens.

[0132] FIG. 9-6 (I) shows a heat map chart obtained by re-aligning 57 surgical specimens and 20 FFPE tissue specimens obtained in Example 1 in the ascending order of the expression scores of 12 genes (middle) and a graph plotting the values of the expression scores of 12 genes (bottom) regarding the expression scores of 12 genes for 12 kinds of BSCE markers represented by NOs: R-1 to R-5 and NOs: R-9 to R-15. The vertical line in the figure represents a cutoff value. In addition, of four bars in the top, the top bar denoted by “Cancer type” indicates distinctions of cancer types (including normal tissues), the second bar denoted by “Diagnosis at Fukushima Medical University” indicates distinctions of cancer types as a result of pathological diagnosis of FFPE tissue specimens at Fukushima Medical University, the third bar denoted by “Basaloid” indicates distinction between BSCE and non-BSCE (colored portions correspond to BSCE), and the bottom bar denoted by “FFPE; Surgery” indicates distinction between surgical specimens and FFPE tissue specimens.

[0133] FIG. 9-7 (J) is a group scatter diagram for all analyzed specimens obtained using the expression scores of 12 genes for 12 kinds of BSCE markers represented by NOs: R-1 to R-5 and NOs: R-9 to R-15 when surgical specimens, biopsy specimens, and FFPE tissue specimens are all combined.

[0134] FIG. 9-8 (K) is a group scatter diagram created separately for each specimen type.

[0135] FIG. 10-1 (A) shows an ROC curve created from the expression scores of 15 genes (the sum of logarithmic transformed relative expression ratios of 15 kinds of BSCE markers) for 57 surgical specimens obtained in Example 1 regarding 15 kinds of BSCE markers represented by NOs: R-1 to R-15 in Table 1. FIG. 10-1 (B) shows a sensitivity-specificity curve from 57 surgical specimens obtained with the use of the 15 kinds of BSCE markers. The vertical axis represents “sensitivity” or “specificity” and the horizontal axis represents the sum of logarithmic transformed relative expression ratios of the 15 kinds of BSCE markers (expression scores of 15 genes).

[0136] FIG. 10-2 (C) shows an ROC curve created from the expression scores of 15 genes for 57 surgical specimens and 312 biopsy specimens obtained in Example 1 regarding 15 kinds of BSCE markers represented by NOs: R-1 to R-15. FIG. 10-2 (D) shows a sensitivity-specificity curve from 57 surgical specimens and 312 biopsy specimens obtained with the use of the 15 kinds of BSCE markers. The vertical axis represents “sensitivity” or “specificity” and the horizontal axis represents the “expression scores of 15 genes.”

[0137] FIG. 10-3 (E) shows an ROC curve created from the expression scores of 15 genes for 57 surgical specimens and 20 FFPE tissue specimens obtained in Example 1 regarding 15 kinds of BSCE markers represented by NOs: R-1 to R-15. FIG. 10-3 (F) shows a sensitivity-specificity curve from 57 surgical specimens and 20 FFPE tissue specimens obtained with the use of the 15 kinds of BSCE markers. The vertical axis represents “sensitivity” or “specificity” and the horizontal axis represents the “expression scores of 15 genes.”

[0138] FIG. 10-4 (G) shows a heat map chart obtained by re-aligning 57 surgical specimens obtained in Example 1 in the ascending order of the expression scores of 15 genes (middle) and a graph plotting the values of the expression scores (bottom) regarding the expression scores of 15 genes for 15 kinds of BSCE markers represented by NOs: R-1 to R-15. The vertical line in the figure represents a cutoff value. In addition, of two bars in the top, the upper bar denoted by “Cancer type” indicates distinctions of cancer types (including normal tissues) and the lower bar denoted by “Basaloid” indicates distinction between BSCE and non-BSCE (colored portions correspond to BSCE).

[0139] FIG. 10-5 (H) shows a heat map chart obtained by re-aligning 57 surgical specimens and 312 biopsy specimens obtained in Example 1 in the ascending order of the expression scores of 15 genes (middle) and a graph plotting the values of the expression scores of 15 genes (bottom) regarding the expression scores of 15 genes for 15 kinds of BSCE markers represented by NOs: R-1 to R-15. The vertical line in the figure represents a cutoff value. In addition, of three bars in the top, the first bar denoted by “Cancer type” indicates distinctions of cancer types (including normal tissues), the second bar denoted by “Basaloid” indicates distinction between BSCE and non-BSCE (colored portions correspond to BSCE), and the bottom bar denoted by “Biopsy; Surgery” indicates distinction between surgical specimens and biopsy specimens.

[0140] FIG. 10-6 (I) shows a heat map chart obtained by re-aligning 57 surgical specimens and 20 FFPE tissue specimens obtained in Example 1 in the ascending order of the expression scores of 15 genes (middle) and a graph plotting the values of the expression scores of 15 genes (bottom) regarding the expression scores of 15 genes for 15 kinds of BSCE markers represented by NOs: R-1 to R-15. The vertical line in the figure represents a cutoff value. In addition, of four bars in the top, the top bar denoted by “Cancer type” indicates distinctions of cancer types (including normal tissues), the second bar denoted by “Diagnosis at Fukushima Medical University” indicates distinctions of cancer types as a result of pathological diagnosis of FFPE tissue specimens at Fukushima Medical University, the third bar denoted by “Basaloid” indicates distinction between BSCE and non-BSCE (colored portions correspond to BSCE), and the bottom bar denoted by “FFPE; Surgery” indicates distinction between surgical specimens and FFPE tissue specimens.

[0141] FIG. 10-7 (J) is a group scatter diagram for all analyzed specimens obtained using the expression scores of 15 genes for 15 kinds of BSCE markers represented by NOs: R-1 to R-15 when surgical specimens, biopsy specimens, and FFPE tissue specimens areall combined.

[0142] FIG. 10-8 (K) is a group scatter diagram created separately for each specimen type.

### DESCRIPTION OF EMBODIMENTS

### 1. Marker for Basaloid Squamous Cell Carcinoma of the Esophagus

### 1-1. Outline

[0143] The first aspect of the present invention relates to a marker for basaloid squamous cell carcinoma of the esophagus (BSCE marker). The BSCE marker of the present invention consists of a group of at least 5 kinds of genes. It is possible to differentiate the presence or absence of BSCE or whether the existing esophageal cancer is BSCE or another esophageal cancer by measuring the expression levels of the genes in samples of a test subject and a healthy subject or a group of healthy subjects, thereby providing a correct differential diagnosis.

### 1-2. Definition

[0144] The “esophagus” is a tubular organ having a length of 20 to 25 cm which extends from the lower end of the cricoid cartilage to the stomach and is formed with three regions corresponding to the cervical esophagus, the thoracic esophagus, and the abdominal esophagus.

[0145] “Esophageal cancer” is a malignant tumor arising from the mucosa of the esophagus. In addition to major esophageal cancers such as squamous cell carcinoma (esophageal squamous cell carcinoma) and adenocarcinoma (esophageal adenocarcinoma), special histopathologic type esophageal cancer such as basaloid squamous cell carcinoma of the esophagus (BSCE) is known.

[0146] “Esophageal squamous cell carcinoma” is an esophageal cancer arising from squamous epithelium that is the original esophageal mucosa. Esophageal squamous cell carcinoma forms solid nest, and differentiates into stratified squamous epithelium. Esophageal squamous cell carcinoma tends to keratinize or differentiate into layers. In many cases, intercellular bridges are observed. Esophageal squamous cell carcinoma has a high incidence in the cervical esophagus or thoracic esophagus, accounting for about 90% of esophageal cancers in Japan.

[0147] “Esophageal adenocarcinoma” is an esophageal cancer that occurs in glandular cells and it often occurs on the gastric side of the abdominal esophagus. Glandular cells form esophageal glands that act on mucus secretion in the esophagus inner wall. In Western countries, the incidence of Barrett's esophageal adenocarcinoma that occurs with the background of Barrett's esophagus is high, accounting for more than half of esophageal cancers.

[0148] “Basaloid squamous cell carcinoma of the esophagus (BSCE)” is a relatively rare esophageal cancer which is classified into a special histopathologic type esophageal cancer as described above. The cancer cells have characteristics similar to basal cells that occur in the esophagus. They are characterized by small cells that grow in solid nests-like or cords-like manner and sometimes form an irregular adenoid, microcystic structure. In addition, deposition of hyaline-like (basal membrane-like) materials is observed inside and outside of the nests. Ductal differentiation of the cancer may be partially observed. Esophageal squamous cell carcinoma is often found in the epithelium and the invasive portion may have esophageal squamous cell carcinoma.

[0149] The term “marker for basaloid squamous cell carcinoma of the esophagus (BSCE marker)” used herein refers to a biomarker capable of differentiating the presence or absence of BSCE or differentiating BSCE from other major esophageal cancers (i.e., esophageal squamous cell carcinoma and esophageal adenocarcinoma).

[0150] The term “differentiating” used herein means to determine whether or not a test subject with a past history of an esophageal cancer has or had BSCE or whether an esophageal cancer patient has any of BSCE and other major esophageal cancers other than BSCE.

### 1-3. Constitution

[0151] In this aspect, BSCE markers are composed of a group of genes for differentiating BSCE. The “group of genes for differentiating BSCE” described herein consists of at least 5 kinds of genes (the COL9A2 gene, the FGF3 gene, the NPTX2 gene, the COL9A3 gene, and the COL9A1 gene) comprising nucleotide sequences shown in SEQ ID NOs: 141 to 145, respectively. In other words, these 5 kinds of genes constitute a group of essential genes for differentiating BSCE for the BSCE markers of this aspect. Preferably, the 5 kinds of genes correspond to NOs: R-1 to R-5, respectively, in Table 1, and are genes encoding proteins consisting of the amino acid sequences shown in SEQ ID NOs: 71 to 75. Specifically, genes consisting of the nucleotide sequences shown in SEQ ID NOs: 1 to 5 can be exemplified. Each gene that constitutes BSCE markers is herein referred to as a “gene for differentiating BSCE.”

TABLE 1

| | | | | SEQ ID NO: | | |
|---|---|---|---|---|---|---|
| No. | gene name | symbol | ID | A | B | C |
| R-1 | collagen, type IX, alpha 2 | COL9A2 | NM_001852.3 | 1 | 71 | 141 |
| R-2 | fibroblast growth factor 3 | FGF3 | NM_005247.2 | 2 | 72 | 142 |
| R-3 | neuronal pentraxin II | NPTX2 | NM_002523.2 | 3 | 73 | 143 |
| R-4 | collagen, type IX, alpha 3 | COL9A3 | NM_001853.3 | 4 | 74 | 144 |
| R-5 | collagen, type IX, alpha 1, transcript | COL9A1 | NM_001851.4 | 5 | 75 | 145 |
| | variant 1 | | | | | |
| R-6 | protein phosphatase 1, regulatory | PPP1R1B | NM_032192.3 | 6 | 76 | 146 |
| | (inhibitor) subunit 1B | | | | | |
| R-7 | tweety family member 1, transcript | TTYH1 | NM_020659.3 | 7 | 77 | 147 |
| | variant 1 | | | | | |
| R-8 | ankyrin repeat and BTB (Paz) domain | ABTB2 | NM_145804.2 | 8 | 78 | 148 |
| | containing 2 | | | | | |
| R-9 | tubulin tyrosine ligase-like family | TTLL4 | NM_014640.4 | 9 | 79 | 149 |
| | member 4 | | | | | |
| R-10 | protein tyrosine phosphatase. | PTPN5 | NM_032781.3 | 10 | 80 | 150 |
| | non-receptor type 5 (striatum-enriched), | | | | | |
| | transcript variant 2 | | | | | |
| R-11 | ets variant 6 | ETV6 | NM_001987.4 | 11 | 81 | 151 |
| R-12 | interleukin 17 receptor D | IL17RD | NM_017563.3 | 12 | 82 | 152 |
| R-13 | coiled-coil domain containing 8 | CCDC8 | NM_032040.4 | 13 | 83 | 153 |
| R-14 | low density lipoprotein receptor-related | LRP6 | NM_002336.2 | 14 | 84 | 154 |
| | protein 6 | | | | | |
| R-15 | ATPase, H+ transporting, lysosomal | ATP6V1B1 | NM_001692.3 | 15 | 85 | 155 |
| | 56/58 kDa, V1 subunit B1 | | | | | |
| R-16 | ras homolog family member T1, | RHOT1 | NM_001033568.2 | 16 | 86 | 156 |
| | transcript variant 1 | | | | | |
| R-17 | serine/threonine kinase 36, transcript | STK36 | NM_015690.4 | 17 | 87 | 157 |
| | variant 1 | | | | | |
| R-18 | oxytocin/neurophysin I prepropeptide | OXT | NM_000915.3 | 18 | 88 | 158 |
| R-19 | multiple EGF-like-domains 6 | MEGF6 | NM_001409.3 | 19 | 89 | 159 |
| R-20 | WAP four-disulfide core domain 1 | WFDC1 | NM_021197.3 | 20 | 90 | 160 |
| R-21 | sema domain, transmembrane domain. | SEMA6A | NM_020796.4 | 21 | 91 | 161 |
| | and cytoplasmic domain, (semaphorin) | | | | | |
| | 6A | | | | | |
| R-22 | Rho guanine nucleotide exchange factor | ARHGEF19 | NM_153213.3 | 22 | 92 | 162 |
| | 19 | | | | | |
| R-23 | phospholipase A2, group VI (cytosolic, | PLA2G6 | NM_005261771.3 | 23 | 93 | 163 |
| | calcium-independent), transcript variant | | | | | |
| | X18 | | | | | |
| R-24 | phospholipase C, beta 4, transcript | PLCB4 | NM_000933.3 | 24 | 94 | 164 |
| | variant 1, | | | | | |
| R-25 | fibroblast growth factor receptor 1, | FGFR1 | NM_023110.2 | 25 | 95 | 165 |
| | transcript variant 1 | | | | | |
| R-26 | SRY (sex determining region Y)-box 9 | SOX9 | NM_000346.3 | 26 | 96 | 166 |
| R-27 | ninein-like | NINL | NM_025176.4 | 27 | 97 | 167 |
| R-28 | transmembrane protein 63A | TMEM63A | NM_014698.2 | 28 | 98 | 168 |
| R-29 | SH3 domain containing ring finger 1 | SH3RF1 | NM_020870.3 | 29 | 99 | 169 |
| R-30 | early B-cell factor 4 | EBF4 | NM_001110514.1 | 30 | 100 | 170 |
| R-31 | fibroblast growth factor 19 | FGF19 | NM_005117.2 | 31 | 101 | 171 |
| R-32 | cilia and flagella associated protein 65 | CFAP65 | NM_194302.3 | 32 | 102 | 172 |
| R-33 | chemokine (C motif) ligand 1 | XCL1 | NM_002995.2 | 33 | 103 | 173 |
| R-34 | atrophic 1, transcript variant 2 | ATNI | NM_001940.3 | 34 | 104 | 174 |
| R-35 | SRY (sex determining region Y)-box 10 | SOX10 | NM_006941.3 | 35 | 105 | 175 |
| R-36 | transcription factor AP-2 gamma | TFAP2C | NM_003222.3 | 36 | 106 | 176 |
| | (activating enhancer binding protein 2 | | | | | |
| | gamma) | | | | | |
| R-37 | transmembrane 4 L six family member 5 | TM4SF5 | NM_003963.2 | 37 | 107 | 177 |
| R-38 | immunoglobulin mu binding protein 2 | IGHMBP2 | NM_002180.2 | 38 | 108 | 178 |
| R-39 | glutathione peroxidase 7 | GPX7 | NM_015696.4 | 39 | 109 | 179 |
| R-40 | sema domain, immunoglobulin domain | SEMA4C | NM_017789.4 | 40 | 110 | 180 |
| | (Ig), transmembrane domain (TM) and | | | | | |
| | short cytoplasmic domain, (semaphorin) | | | | | |
| | 4C | | | | | |
| R-41 | deltex 3, E3 ubiquitin ligase, transcript | DTX3 | NM_178502.3 | 41 | 111 | 181 |
| | variant 1 | | | | | |
| R-42 | inositol polyphosphate-5-phosphatase F, | INPP5F | NM_014937.3 | 42 | 112 | 182 |
| | transcript variant 1 | | | | | |
| R-43 | dedicator of cytokinesis 1, transcript | DOCK1 | NM_001360.4 | 43 | 113 | 183 |
| | variant 2 | | | | | |
| R-44 | RAB, member of RAS oncogene | RABL2B | NM_007081.2 | 44 | 114 | 184 |
| | family-like 2B, transcript vacant 2 | | | | | |
| R-45 | nuclear receptor corepressor 2, | NCOR2 | NM_006312.5 | 45 | 115 | 185 |
| | transcript variant 1 | | | | | |
| R-46 | FK506 binding protein 9, 63 kDa, | FKBP9 | NM_007270.4 | 46 | 116 | 186 |
| | transcript variant 1 | | | | | |
| R-47 | inhibitor of growth family, member 4, | ING4 | NM_016162.3 | 47 | 117 | 187 |
| | transcript variant 1 | | | | | |
| R-48 | myeloid/lymphoid or mixed-lineage | MLLT6 | NM_005937.3 | 48 | 118 | 188 |
| | leukemia; translocated to, 6 | | | | | |
| R-49 | intraflagellar transport 172 | IFT172 | NM_015662.2 | 49 | 119 | 189 |
| R-50 | acyl-CoA synthetase short-chain family | ACSS1 | NM_032501.3 | 50 | 120 | 190 |
| | member 1, transcript variant 1 | | | | | |
| R-51 | tripartite motif containing 17 (TRIM17), | TRIM17 | NM_016102.3 | 51 | 121 | 191 |
| | transcript variant 1 | | | | | |
| R-52 | signal peptide, CUB domain, EGF-like | SCUBE3 | NM_152753.3 | 52 | 122 | 192 |
| | 3, transcript variant 1 | | | | | |
| R-53 | EMI domain containing 1, transcript | EMID1 | NM_133455.3 | 53 | 123 | 193 |
| | variant 1 | | | | | |
| R-54 | ral guanine nucleotide dissociation | RGL3 | NM_001161616.2 | 54 | 124 | 194 |
| | stimulator-like 3, transcript variant 1 | | | | | |
| R-55 | sorting nexin 22, transcript variant 1 | SNX22 | NM_024798.2 | 55 | 125 | 195 |
| R-56 | T-box 3, transcript variant 1 | TBX3 | NM_005996.3 | 56 | 126 | 196 |
| R-57 | insulin-like growth factor 1 receptor, | IGF1R | NM_000875.4 | 57 | 127 | 197 |
| | transcript variant 1 | | | | | |
| R-58 | paired immunogiobin-like type 2 | PILRB | NM_178238.3 | 58 | 128 | 198 |
| | receptor beta | | | | | |
| R-59 | KIAA1324-like, transcript variant 1 | KIAA1324L | NM_152748.3 | 59 | 129 | 199 |
| R-60 | frizzled class receptor 1 | FZD1 | NM_003505.1 | 60 | 130 | 200 |
| R-61 | dpy-19-like 2 (C. elegans) | DPY19L2 | NM_173812.4 | 61 | 131 | 201 |
| R-62 | fibrillin 3 | FBN3 | NM_032447.3 | 62 | 132 | 202 |
| R-63 | protein-L-isoaspartate (D-aspartate) | PCMTD2 | NM_018257.2 | 63 | 133 | 203 |
| | O-methyltransferase domain containing | | | | | |
| | 2, transcript variant 1 | | | | | |
| R-64 | TBC1 domain family, member 32, | TBC1D32 | NM_152730.5 | 64 | 134 | 204 |
| | transcript variant 1 | | | | | |
| R-65 | homeobox A9 | HOXA9 | NM_152739.3 | 65 | 135 | 205 |
| R-66 | thioredoxin-related transmembrane | TMX4 | NM_021156.3 | 66 | 136 | 206 |
| | protein 4 (TMX4) | | | | | |
| R-67 | nerve growth factor receptor | NGFR | NM_002507.3 | 67 | 137 | 207 |
| R-68 | UDP-Gal:betaGlcNAc beta 1,4- | B4GALT5 | NM_004776.3 | 68 | 138 | 208 |
| | galactosyltransferase, polypeptide 5 | | | | | |
| R-69 | transmembrane protein 98, transcript | TMEM98 | NM_015544.2 | 69 | 139 | 209 |
| | variant 1 | | | | | |
| R-70 | calpain 6 | CAPN6 | NM_014289.3 | 70 | 140 | 210 |

[0152] In Table 1, “gene name” means the name of a gene for differentiating BSCE, “symbol” means the abbreviation for a gene for differentiating BSCE, and “ID” means the accession number of a gene for differentiating BSCE. In addition, “SEQ ID NO” is composed of A denoting the full-length nucleotide sequence of a gene for differentiating BSCE, B denoting the full-length amino acid sequence of a protein encoded by the gene, and C denoting the nucleotide sequence used as a probe.

[0153] In this aspect, BSCE markers may include selected genes for differentiating BSCE in addition to the group of essential genes for differentiating BSCE. The terms “selected genes for differentiating BSCE” as used herein refer to genes other than essential genes for differentiating BSCE which belong to the group of genes for differentiating BSCE described in Table 1. In a case in which there are a plurality of selected genes for differentiating BSCE, they are often herein referred to as a “group of selected genes for differentiating BSCE.”

[0154] In this aspect, BSCE markers may further include, as selected genes for differentiating BSCE, one or more of 3 kinds of genes (the PPP1R1B gene, the TTYH1 gene, and the ABTB2 gene) comprising the nucleotide sequences shown in SEQ ID NOs: 146 to 148, respectively, in addition to the group of essential genes for differentiating BSCE. Preferably, the genes comprising the nucleotide sequences shown in SEQ ID NOs: 146 to 148 correspond to NOs: R-6 to R-8, respectively, in Table 1, and are genes encoding proteins consisting of the amino acid sequences shown in SEQ ID NOs: 76 to 78. For example, genes consisting of the nucleotide sequences shown in SEQ ID NOs: 6 to 8 can be exemplified.

[0155] In this aspect, BSCE markers may further include, as selected genes for differentiating BSCE, one or more of 5 kinds of genes (the TTLLA gene, the PTPN5 gene, the ETV6 gene, the IL17RD gene, and the CCDC8 gene) comprising the nucleotide sequences shown in SEQ ID NOs: 149 to 153, respectively, in addition to the group of essential genes for differentiating BSCE. Preferably, the genes comprising the nucleotide sequences shown in SEQ ID NOs: 149 to 153 correspond to NOs: R-9 to R-13, respectively, in Table 1, and are genes encoding proteins consisting of the amino acid sequences shown in SEQ ID NOs: 79 to 83. For example, genes consisting of the nucleotide sequences shown in SEQ ID NOs: 9 to 13 can be exemplified. In this case, the BSCE marker may further include at least one of the above-mentioned genes comprising the nucleotide sequences shown in SEQ ID NOs: 146 to 148, which are selected genes for differentiating BSCE, preferably genes encoding proteins consisting of the amino acid sequences shown in SEQ ID NOs: 76 to 78, and more preferably genes consisting of the nucleotide sequences shown in SEQ ID NOs: 6 to 8.

[0156] In this aspect, BSCE markers may further include, as selected genes for differentiating BSCE, one or more of genes comprising the nucleotide sequences shown in SEQ ID NOs: 154 to 210, respectively, in addition to the group of essential genes for differentiating BSCE. Preferably, the genes comprising the nucleotide sequences shown in SEQ ID NOs: 154 to 210 correspond to NOs: R-14 to R-70, respectively, in Table 1, and are genes encoding proteins consisting of the amino acid sequences shown in SEQ ID NOs: 84 to 140. For example, genes consisting of the nucleotide sequences shown in SEQ ID NOs: 14 to 70 can be exemplified. In this case, the BSCE marker may further include at least one of the above-mentioned genes comprising the nucleotide sequences shown in SEQ ID NOs: 146 to 153, which are selected genes for differentiating BSCE, preferably genes encoding proteins consisting of the amino acid sequences shown in SEQ ID NOs: 76 to 83, and more preferably genes consisting of the nucleotide sequences shown in SEQ ID NOs: 6 to 13.

[0157] Therefore, in this aspect, the BSCE markers are composed of a group of 5 to 70 kinds of genes for differentiating BSCE. In general, the BSCE markers in this aspect have higher degrees of differentiation accuracy according to the method for differentiating the contraction of BSCE as the number of kinds of genes included therein increases.

[0158] In description, the BSCE markers described herein are genes consisting of nucleotide sequences of DNAs (cDNAs). However, mRNAs consisting of RNA sequences which are generated as transcription products upon expression of the genes, proteins consisting of amino acid sequences generated as translation products of the genes, and partial fragments thereof also reflect the expression of genes as the markers, and therefore, they can indirectly serve as BSCE markers.

[0159] In addition, genes for differentiating BSCE that constitute BSCE markers also include nucleotides having 70% or more, 75% or more, 80% or more, 85% or more, 90% or more, 95% or more, 96% or more, 97% or more, 98% or more, or 99% or more base identity with the nucleotide sequences of the above-described genes, nucleotides with a deletion, substitution, or addition of one or more nucleotides in the nucleotide sequences of the above-described genes, and nucleotides wherein the nucleic acids hybridize to nucleotide fragments consisting of nucleotide sequences complementary to partial nucleotide sequences of the genes under stringent conditions and the enzymatic activity is retained. Specific examples of such nucleotides include nucleotides comprising degenerate codons encoding the same amino acid sequence, mutated genes such as various mutants (variants) of individual genes and point-mutated genes, and ortholog genes of organisms of other species such as chimpanzee. The term “base identity” used herein refers to a percentage (%) of the number of identical bases in nucleotide sequences of nucleotides to be compared with respect to the total number of bases of genes described in Table 1 when two nucleotide sequences are aligned, if necessary with a gap such that the degree of matching between both nucleotide sequences is maximized. The terms “a plurality of nucleotides” mean 2 to 30 nucleotides, 2 to 14 nucleotides, 2 to 10 nucleotides, 2 to 8 nucleotides, 2 to 6 nucleotides, 2 to 5 nucleotides, 2 to 4 nucleotides, or 2 to 3 nucleotides. In addition, the term “stringent conditions” refers to conditions that do not cause a non-specific hybrid to be formed. In general, lower salt concentrations at higher temperatures tend to result in highly stringent conditions. Low stringent conditions correspond to, for example, conditions for washing after hybridization at 1×SSC, 0.1% SDS, and about 37° C. and more strictly at 0.5×SSC, 0.1% SDS, and about 42° C. to 50° C. More highly stringent conditions correspond to conditions for washing after hybridization at, for example, 50° C. to 70° C., 55° C. to 68° C., or 65° C. to 68° C. with 0.1×SSC and 0.1% SDS. In general, highly stringent conditions are preferable. The combinations of SSC, SDS, and the temperature described above are merely examples. Persons skilled in the art also can determine stringency of hybridization by combining the probe concentration, probe base length, hybridization time, and other conditions with SSC, SDS, and the temperature, as appropriate.

### 2. Method for Differentiating Contraction of Basaloid Squamous Cell Carcinoma of the Esophagus

### 2-1. Outline

[0160] The second aspect of the present invention relates to a method for assisting differentiating contraction of basaloid squamous cell carcinoma of the esophagus (BSCE) in a test subject. The method for differentiating contraction of BSCE of the present invention is a method comprising obtaining expression profiles of the BSCE markers described in the first aspect, which are contained in samples collected from a test subject and a healthy subject or a group of healthy subjects, and assisting differentiating whether an esophageal cancer in the test subject is basaloid squamous cell carcinoma of the esophagus or another esophageal cancer based on the expression profiles. The terms “expression profile of the BSCE marker” mean information on the expression level of each of genes for differentiating BSCE included in BSCE markers. The expression profiles described herein especially correspond to gene expression patterns established based on information about the expression levels of a plurality of genes for differentiating BSCE. In general, obtaining more gene expression profiles enables differentiation with higher degrees of accuracy.

### 2-2. Method

[0161] The method for differentiating contraction of BSCE of the present invention comprises a measurement step, a calculation step, and a determination step as essential steps. Hereinafter, each step is specifically explained.

### 2-2-1. Measurement Step

[0162] The term “measurement step” is a step of measuring expression levels of the BSCE markers of the first aspect per unit amount of samples collected from a test subject and a healthy subject or a group of healthy subjects, thereby obtaining measurement values thereof.

[0163] The term “test subject” used herein refers to a human individual who provides a sample and is subjected to a test. The test subject may be either an individual having a past history of an esophageal cancer or an individual suspected to be affected with an esophageal cancer. The term “individual having a past history of an esophageal cancer” described herein may include a patient currently affected with an esophageal cancer and a person having a past history of an esophageal cancer who was affected with an esophageal cancer in the past. Since histopathological distinction of BSCE from esophageal squamous cell carcinoma is difficult, a patient who has been histopathologically diagnosed as suspected esophageal squamous cell carcinoma or a person having a past history of esophageal squamous cell carcinoma is a suitable test subject.

[0164] The term “a healthy subject” used herein refers to a human in a healthy state. Note that healthy human cells are herein included in healthy subjects in a broad sense. It is therefore determined that a human in a healthy state not only at the level of individuals but also at the level of cells, which means, for example, a normal portion of a tissue collected from an esophageal cancer patient, can be referred to as a healthy subject.

[0165] The term “healthy state” used herein refers to a state in which a person is not affected with at least an esophageal cancer. In other words, the healthy subject described herein is a human individual (including human cells) who is not affected with esophageal cancer, preferably a healthy human individual (including human cells) without any disease or abnormality. A healthy subject used in this aspect is not particularly limited in terms of physical conditions such as gender, age, height, and weight and the number of individuals. However, it is preferable that the person is of the same gender of a test subject and has physical conditions such as age, height, and weight identical or similar to the test subject. A group consisting of a plurality of healthy subjects is herein referred to as a “group of healthy subjects.”

[0166] The term “sample” used herein refers to an object that is collected from the test subject or the healthy subject or the group of healthy subjects and subjected to the method for differentiating contraction of BSCE in this aspect, which corresponds to, for example, a tissue, cells, body fluid, or peritoneal washing fluid. The term “tissue” and “cells” described herein may be derived from any sites of a test subject or a healthy subject. However, they are preferably specimens collected by biopsy or excised by surgery and more specifically an esophageal tissue or esophageal cells. Esophageal cancer cells collected by biopsy or an esophageal tissue or esophageal cells of a suspected esophageal cancer are particularly preferable. Such tissue or cells may be formalin-fixed and then paraffin-embedded (FFPE: Formalin-Fixed Paraffin Embedded). The term “body fluid” used herein refers to a liquid biological sample collected from a test subject or a healthy subject. Examples of body fluid include blood (including serum, plasma and interstitial fluid), spinal fluid (cerebrospinal fluid), urine, lymph, digestive fluid, ascitic fluid, pleural effusion, fluid surrounding nerve roots, and extracts of tissues or cells. Blood is preferable.

[0167] A tissue or cells can be collected as samples by biopsy or surgical excision. In addition, body fluid can be collected as a sample by a method known in the art. For example, blood or lymph can be collected as a sample in accordance with a known blood collection method. The amount of a sample required for the method for differentiating contraction of BSCE in this aspect is not particularly limited. It is desirable to collect a tissue or cells in an amount of at least 10 μg, preferably at least 0.1 mg. However, a tissue or cells may be obtained as a biopsy material. In addition, the sufficient amount of body fluid such as blood or lymph can be at least 0.1 mL, preferably at least 1 mL, and more preferably at least 10 mL. If necessary, a sample can be prepared and treated such that the BSCE markers of the first aspect can be measured. For example, if a sample is a tissue or cells, homogenization, cell lysis treatment, removal of contaminants by centrifugation or filtration, the addition of protease inhibitors, etc. are exemplified. Details of these treatment procedures are specifically described in Green & Sambrook, Molecular Cloning, 2012, Fourth Ed., Cold Spring Harbor Laboratory Press for reference.

[0168] The term “unit amount” used herein refers to any determined sample amount. For example, it corresponds to a volume (expressed in μL or mL) or a weight (expressed in μg, mg, or g). Although the unit amount is not particularly specified, the same unit amount is employed for a series of measurements according to the method for differentiating contraction of BSCE. Therefore, the unit amount of a sample from a test subject and the unit amount of a sample from a healthy subject are always the same when measured in this step. The unit amount may be changed when the method for differentiating contraction of BSCE is conducted in a new setting. It is, however, convenient to use the same unit amount in each method for differentiating contraction of BSCE, thereby making it possible to reuse measurement values of the previous measurement as measurement value for a healthy subject or a group of healthy subjects as long as the other conditions are the same without the need to conduct measurement every time the method for differentiating contraction of BSCE is carried out.

[0169] The term “gene expression level” used herein refers to the expression level of a gene for differentiating BSCE (the amount of a transcription product), expression intensity, or expression frequency. The gene expression level described herein is not limited to the expression level of a wild-type gene for differentiating BSCE and thus may include the expression level of a mutant gene such as a point-mutated gene. In addition, transcription products showing expression of genes for differentiating BSCE may include atypical transcription products (variants) such as splice variants and fragments thereof. This is because it is possible to construct a gene expression profile according to the present invention even with information based on mutant genes, transcription products, or fragments thereof. The gene expression levels can be obtained as measurement values by measuring, e.g., transcription products of a group of genes for differentiating BSCE included in BSCE markers, i.e., mRNA amounts or the amounts or activity levels of proteins as translation products of mRNA.

[0170] The term “measurement value” used herein refers to a value obtained by method for measuring a gene expression level. The measurement value may be an absolute value of the mRNA amount or protein amount in a sample expressed in a unit such as nanogram (ng) or microgram (μg), or a relative value expressed as absorbance relative to a control value, fluorescence intensity of a labeled molecule, or the like. Further, in the case of the measurement value of protein activity, it may be specific activity.

[0171] Hereinafter, a method for measuring a transcription product or a translation product of each gene for differentiating BSCE will be specifically described.

### (1) Measurement of Transcription Products

[0172] Measurement of transcription products of genes for differentiating BSCE may be measurement of mRNA amounts or measurement of amounts of cDNAs obtained through reverse transcription of mRNA. In general, for measurement of a transcription product of a gene, a method for measuring the gene expression level as an absolute value or relative value using a nucleotide comprising all or a part of the nucleotide sequence of the above-described gene as a primer or a probe is employed.

[0173] In this aspect, primers or probes are usually composed of naturally occurring nucleic acids such as DNA and RNA. DNA is particularly preferable because of high stability and the ease of synthesis at an inexpensive cost. It is also possible to combine naturally occurring nucleic acids and chemically modified nucleic acids or pseudo nucleic acids as needed. Examples of chemically modified nucleic acids or pseudo nucleic acids include peptide nucleic acid (PNA), Locked Nucleic Acid (LNA; registered trademark), methyl phosphonate DNA, a phosphorothioate DNA, and 2′-O-methyl RNA. Further, the primers and probes may be labeled or modified with fluorescent substances and/or quencher substances, or labeling substances such as radioactive isotopes (e.g., ³²P, ³³P, ³⁵S), or modifiers such as biotin or (strept) avidin and magnetic beads. Labeling substances are not limited, and commercially available products can be used. For example, it is possible to use fluorescent substances such as FITC, Texas, Cy3, Cy5, Cy7, Cyanine3, Cyanine5, Cyanine7, FAM, HEX, VIC, fluorescamine and derivatives thereof, and rhodamine and derivatives thereof. As quencher substances, AMRA, DABCYL, BHQ-1, BHQ-2, BHQ-3, etc. can be used. A position for labeling a primer or a probe with a labeling substance can be determined, as appropriate, depending on the characteristics or intended use of a modifier. In general, the 5′ or 3′ end is often modified. In addition, a single primer or probe molecule may be labeled with one or more labeling substances. A nucleotide can be labeled with such substance by a known method.

[0174] A nucleotide used as a primer or probe may be any nucleotide consisting of a sense strand or an antisense strand of each of genes included in the BSCE markers described above.

[0175] The base length of a primer or a probe is not particularly limited. In a case in which a probe is used in a hybridization method described later, the base length thereof is from at least a 10-base length to the full-length of a gene for differentiating BSCE, preferably from a 15-base length to the full-length of a gene for differentiating BSCE, more preferably from a 30-base length to the full-length of a gene for differentiating BSCE, and further preferably from a 50-base length to the full-length of a gene for differentiating BSCE. In a case in which a probe is used for a microarray, the base length thereof is a 10- to 200-base length, preferably a 20- to 150-base length, and more preferably a 30- to 100-base length. In general, a longer probe results in higher hybridization efficiency and higher sensitivity. On the other hand, a shorter probe results in lower sensitivity, but conversely, it also results in higher specificity. Specific examples of a probe include nucleotides of 80 bases consisting of nucleotide sequences shown in SEQ ID NOs: 141 to 210 in C in Table 1. Meanwhile, for primers, each of a forward primer and a reverse primer may have a length of 10 to 50 bases, preferably 15 to 30 bases.

[0176] Preparation of the above-described primers or probes is known to persons skilled in the art. For example, they can be prepared according to the method described in Green & Sambrook, Molecular Cloning (2012) mentioned above. It is also possible to provide a contracted manufacturer for nucleic acid synthesis with sequence information for commissioned manufacturing.

[0177] Measurement of transcription products of genes for differentiating BSCE may be conducted by a known nucleic acid quantification method and it is not particularly limited. For example, the hybridization method or the nucleic acid amplification method is exemplified.

[0178] The term “hybridization method” refers to a method for detecting or quantifying a target nucleic acid or a fragment thereof using, as a probe, a nucleic acid fragment having a nucleotide sequence complementary to all or a part of the nucleotide sequence of a target nucleic acid to be detected and utilizing base pairing between the nucleic acid and the probe. In this aspect, target nucleic acids are mRNAs or cDNAs of each gene for differentiating BSCE included in BSCE markers or fragments thereof. In general, the hybridization method is preferably carried out under stringent conditions to eliminate non-target nucleic acids that is nonspecifically hybridized. The above-described highly stringent conditions at a low salt concentration and a high temperature are more preferable. There are several known hybridization methods involving different detection means, which are preferably, for example, a Northern blot method (Northern hybridization method), a microarray method, a surface plasmon resonance method, and a quartz crystal microbalance method.

[0179] The term “Northern blot method” is the most common method for analyzing gene expression, in which total RNA or mRNA prepared from a sample is separated by electrophoresis through agarose gel or polyacrylamide gel, etc. before blotting on a filter, and then, a target nucleic acid is detected using a probe having a nucleotide sequence specific to a target RNA. It is also possible to quantify a target nucleic acid by labeling the probe with a suitable marker such as a fluorescent dye or a radioactive isotope, and by, for example, a measurement device such as a chemiluminescence imaging system (e.g., Light Capture; ATTO Corporation), a scintillation counter, or an imaging analyzer (e.g., Fujifilm Corporation: BAS series). The Northern blot method is a well-known prominent technique in the art. For example, Green, M. R. and Sambrook, J. (2012) mentioned above can be referred to.

[0180] The term “microarray method” is a method for detecting and quantifying a nucleic acid hybridized to an array spot by fluorescence or the like, in which a sample containing a target nucleic acid is allowed to react on a microarray or microchip in which a nucleic acid fragment complementary to all or a part of the nucleotide sequence of the target nucleic acid as a probe is disposed as a small spot at a high density on a substrate and immobilized. The target nucleic acid may be RNA such as mRNA or DNA such as cDNA. Detection and quantification can be achieved by detecting and measuring fluorescence or the like based on the hybridization of the target nucleic acid or the like using a microplate reader or a scanner. Based on the measured fluorescence intensity, it is possible to detect the amount of mRNA or the cDNA or the abundance ratio thereof relative to reference mRNA. The microarray method is also a technique well-known in the art. For example, DNA Microarray Method (DNA microarray and the latest PCR method (2000); editorial supervisors: Masaaki Muramatsu and Hiroyuki Nawa; Shujunsha Co., Ltd) may be referred to.

[0181] The term “surface plasmon resonance (SPR) method” is a method for detecting and quantifying an adsorbate on the surface of a metal thin film at very high sensitivity by utilizing the surface plasmon resonance phenomenon, in which the reflected light intensity is significantly attenuated in a certain incidence angle (resonance angle) when the incident angle of laser light applied to the metal thin film is changed. In the present invention, for example, a probe having a sequence complementary to the nucleotide sequence of a target nucleic acid is immobilized to the surface of a metal thin film, other portions of the surface of the metal thin film are treated by blocking, and a sample collected from a test subject or a healthy subject or a group of healthy subjects is distributed on the surface of the metal thin film, thereby allowing base pairing to form between the target nucleic acid and the probe so as to detect or quantify the target nucleic acid based on the difference in measurement values before and after the distribution of the sample. Detection and quantification by the surface plasmon resonance method can be carried out using, for example, an SPR sensor marketed by Biacore, Inc. This technology is well known in the art. For example, Kazuhiro Nagata and Hiroshi Handa, Real-time Analysis Experimental Method for Interaction of Biological Materials, Springer-Verlag Tokyo, Tokyo, 2000 can be referred to.

[0182] The term “quartz crystal microbalance (QCM) method” is a mass measurement method for quantitatively capturing a very small amount of an adsorbate based on the amount of change in resonance frequency by utilizing the phenomenon that when a substance is adsorbed to the surface of an electrode attached to a crystal oscillator, the resonance frequency of the crystal oscillator decreases in accordance with the mass of the substance. In the case of detection and quantification according to the this method, it is also possible to detect and quantify a target nucleic acid based on, for example, base pairing between a probe having a sequence complementary to the nucleotide sequence of the target nucleic acid immobilized on the electrode surface and the target nucleic acid in a sample collected from a test subject or a healthy subject or a group of healthy subjects by utilizing the commercially available QCM sensor as in the SPR method. This technique is well known in the art. For example, Christopher J. et al., 2005, Self-Assembled Monolayers of a Form of Nanotechnology, Chemical Review, 105:1103-1169 and Toyosaka Moriizumi, Takamichi Nakamoto, (1997) Sensor Engineering, Shokodo Co., Ltd. can be referred to.

[0183] The term “nucleic acid amplification method” is a method for amplifying a specific region of a target nucleic acid by a nucleic acid polymerase using forward/reverse primers. For example, the PCR method (including the RT-PCR method), the NASBA method, the ICAN method, and the LAMP (registered trademark) (including the RT-LAMP method) are exemplified. The PCR method is preferable. As a method for measuring a transcription product of a gene using the nucleic acid amplification method, a quantitative nucleic acid amplification method such as the real-time RT-PCR method is used. As the real-time RT-PCR method, an intercalator method using SYBR (registered trademark) Green or the like, a Taqman (registered trademark) probe method, a digital PCR method, and a cycling probe method are known, and any of such methods can be used. Any of these methods is a known method and described in an appropriate protocol in the art. Therefore, such protocol can be referred to.

[0184] A method for quantifying transcription product of a gene by real-time RT-PCR method will be briefly described below by way of an example. The real-time RT-PCR method is a method for quantifying a nucleic acid by PCR using a temperature cycler system provided with a function to detect fluorescence intensity derived from an amplification product in a reaction system in which a PCR amplification product is specifically fluorescence-labeled using, as a template, cDNA prepared from mRNA in a sample by reverse transcription reaction. The amount of the amplification product of the target nucleic acid during reaction is monitored in real time, and the results are regression-analyzed by a computer. The method for labeling an amplification product may be a method using fluorescence-labeled probes (e.g., the TaqMan (registered trademark) PCR method) and an intercalator method using a reagent which specifically binds to double-stranded DNA. The TaqMan (registered trademark) PCR method uses a probe modified with a quencher substance at the 5′ end and a fluorescent dye at the 3′ end. Usually, the quencher substance at the 5′ end suppresses the fluorescent dye at the 3′ end. However, as a result of PCR, the probe is degraded due to 5′->3′ exonuclease activity of the Taq polymerase, which releases the suppression by the quencher substance. This results in emission of fluorescence. The fluorescence amount reflects the amount of the amplification product. Since the cycle number (CT) when the amplification product reaches the detection limit is inversely related to the initial template amount, the initial template amount is quantified by measuring CT in the real-time measurement method. An absolute value of the initial template amount of an unknown sample can be calculated with a calibration curve created by measuring CT for a template of known several different amounts. As a reverse transcriptase used in RT-PCR, for example, M-MLV RTase, ExScriptRTase (Takara Bio Inc.), Super Script II RT (Thermo Fisher Scientific Inc.), or the like can be used.

[0185] In general, reaction conditions for real-time PCR would vary depending on the base length of a nucleic acid fragment to be amplified, the amount of a nucleic acid to be used as a template, the base lengths and Tm values of primers to be used, the optimal reaction temperature and optimal pH of a nucleic acid polymerase to be used, etc. Therefore, the reaction conditions can be determined as appropriate based on the known PCR method in consideration of these factors. As an example, usually, it is possible to perform an elongation reaction by repeating about 15 to 40 cycles including as one cycle a denaturation reaction at 94° C. to 95° C. for 5 seconds to 5 minutes, an annealing reaction at 50° C. to 70° C. for 10 seconds to 1 minute, and an elongation reaction at 68° C. to 72° C. for 30 seconds to 3 minutes. In a case in which a commercially available kit marketed by a manufacturer is used, real-time PCR may be performed in accordance with the protocol provided with the kit in principle.

[0186] The nucleic acid polymerase used in real-time PCR is a DNA polymerase, and in particular, a heat-resistant DNA polymerase. Such a nucleic acid polymerase is commercially available in various kinds, and it is also possible to utilize these commercially available products. For example, Taq DNA polymerase provided with the Applied Biosystems TaqMan MicroRNA Assays Kit (Thermo Fisher Scientific, Inc.) is exemplified. Such a commercially available kit is very useful because a buffer or the like optimized for activity of the provided DNA polymerase is included therewith.

### (2) Measurement of Translation Products

[0187] Measurement of translation products of genes for differentiating BSCE may be measurement of the amounts of proteins (peptides) encoded by genes for differentiating BSCE or measurement of activity levels of the proteins.

### (2-1) Measurement of the Protein Amount

[0188] In general, for measurement of the amount of a protein, a method in which a binding agent that recognizes the amino acid sequence of the protein, and in particular, a highly specific and characteristic amino acid sequence, and binds the amino acid sequence is employed. Examples of such binding agent include an antibody or an antibody fragment thereof and a nucleic acid aptamer.

### (Antibody)

[0189] An antibody or a fragment thereof for use in this step recognizes, as an epitope, a part of a protein encoded by a gene for differentiating BSCE (BSCR marker protein) and specifically binds thereto by an antigen-antibody reaction, thereby making it possible to detect the BSCE marker protein. The term “part” used herein means a region consisting of 5 to 15, preferably 5 to 10, and more preferably 6 to 10 contiguous amino acids.

[0190] The antibody used in this step may be any of a polyclonal antibody, a monoclonal antibody, and a recombinant antibody. To allow more specific detection, a monoclonal antibody or a recombinant antibody is preferred. Globulin type of the antibody is not particularly limited and it may be any of IgG, IgM, IgA, IgE, IgD, and IgY. IgG and IgM are preferred. In addition, the species of organism as the origin of the antibody in this aspect is not particularly limited. It can be any animal including a mammal or a bird. Examples thereof include mice, rats, guinea pigs, rabbits, goats, donkeys, sheep, camels, horses, chickens, and humans.

[0191] The term “recombinant antibody” used herein refers to, for example, a chimeric antibody, a humanized antibody, or a synthetic antibody.

[0192] The term “chimeric antibody” refers to an antibody obtained by replacing the constant regions (C regions) of the light and heavy chains of a certain antibody with the C regions of the light and heavy chains of another antibody. For example, in a mouse anti-human monoclonal antibody, an antibody which substituted the C regions of the light and heavy chains thereof by the C regions of a suitable human antibody corresponds to a chimeric antibody. In other words, in this case, a variable region (V region) including CDR is derived from the mouse antibody and the C region is derived from the human antibody.

[0193] The term “humanized antibody” is also referred to as a “reconstruction (reshaped) human antibody” which is a mosaic antibody obtained by substituting CDR in an antibody from a non-human mammal for a target antigen by CDR of a human antibody. For example, an antibody obtained by preparing a recombinant antibody gene by substituting DNA sequences encoding each CDR region (CDR1 to CDR3) of a mouse anti-human FBXO32 antibody by DNA sequences encoding each corresponding CDR region from an appropriate human antibody and allowing the gene to be expressed corresponds to a humanized antibody.

[0194] The term “synthetic antibody” refers to an antibody synthesized by a chemical method or a recombinant DNA method. For example, a monomeric polypeptide molecule obtained by artificially linking at least one VL and at least one VH of a certain antibody via a linker peptide or the like having a suitable length and a suitable sequence or a multimeric polypeptide thereof corresponds to a synthetic antibody. Specific examples of such polypeptide include single-chain Fv (scFv: single chain Fragment of variable region) (see Pierce Catalog and Handbook, 1994-1995, Pierce Chemical Co., Rockford, Ill.), a diabody, a triabody, and a tetrabody. Usually, VL and VH are located on separate polypeptide chains (the light chain and the heavy chain) in an immunoglobulin molecule. Single-chain Fv is a synthetic antibody fragment having a structure in which V regions on these two polypeptide chains are linked via a flexible linker having a sufficient length such that the regions are included in a single polypeptide chain. Both V regions in a single-chain Fv can form one functional antigen binding site by self-assembling with each other. Single-chain Fv can be obtained by integrating a recombinant DNA encoding it into a phage genome using a known technique and allowing the DNA to be expressed. A diabody is a molecule having a structure based on the dimer structure of single-chain Fv (Holliger et al., 1993, Proc. Natl. Acad. Sci. USA 90:6444-6448). A triabody and a tetrabody have a trimeric structure and a tetrameric structure, respectively, based on the single-chain Fv structure as in a diabody. They are trivalent and tetravalent antibody fragments, respectively, and they may be multi-specific antibodies.

[0195] It is preferable that an antibody used in this step has high affinity with a BSCE marker protein having a dissociation constant of 10⁻⁸ M or less, preferably 10⁻⁹ M or less, and more preferably 10⁻¹⁰ M or less. The dissociation constant can be determined using a technique known in the art. For example, it may be determined using speed evaluation kit software by the BIAcore system (GE Healthcare Inc.).

[0196] A polyclonal antibody of this aspect used in this step can be obtained by a method known in the art for immunizing a suitable animal with a BSCE marker protein. Further, a monoclonal antibody can also be obtained by a known method which is a commonly used technique in the art. For example, after immunization of a mouse or the like with a BSCE marker protein or a peptide fragment thereof, antibody-producing cells are collected from the immunized animal. The antibody-producing cells are fused to a myeloma cell line, thereby generating hybridoma cells. Accordingly, a hybridoma, which produces a monoclonal antibody that binds to a BSCE marker protein or the like used as a target antigen, may be identified.

[0197] Examples of an “antibody fragment” include Fab, F(ab′)₂, and Fv, which are peptide fragments having antigen-binding activity of any antibody described above.

[0198] An antibody or an antibody fragment thereof for use in this step may be modified. The term “modification” used herein includes labeling necessary for antibody detection or functional modification necessary for antigen-specific binding activation. Labeling includes, for example, labeling with the above-described fluorescent materials, fluorescent proteins (e.g., PE, APC, and GFP), enzymes (e.g., horseradish peroxidase, alkaline phosphatase, and glucose oxidase), or biotin or (strept)avidin. In addition, an example of modification is glycosylation of an antibody, which is performed for adjusting the affinity to a BSCE marker protein as a target antigen. A specific example is modification for causing loss of glycosylation at a glycosylation site by introducing a substitution into an amino acid residue constituting the glycosylation site in the framework (FR) region of an antibody so as to remove the glycosylation site.

### (Nucleic Acid Aptamer)

[0199] The term “nucleic acid aptamer” refers to an aptamer composed of nucleic acids, which is a ligand molecule capable of specifically inhibiting or suppressing the function of a target substance, such as physiological activity of the target substance, by strongly and specifically binding to the target substance, wherein the binding is provided by its conformation formed based on a secondary structure and also a tertiary structure of single-stranded nucleic acid molecules via a hydrogen bonding or the like. Nucleotides constituting a nucleic acid aptamer are usually RNAs and/or DNAs which are natural nucleic acids. However, they may include non-natural nucleotides which are capable of transcription or replication. Preferably, an RNA aptamer consisting of RNAs only or a DNA aptamer consisting of DNAs only is employed.

[0200] A nucleic acid aptamer for use in this step can be prepared using a BSCE marker protein as a target molecule by a method known in the art. For example, an in vitro screening method based on the systematic evolution of ligands by exponential enrichment (SELEX) method is exemplified. For example, in the case of separating an RNA aptamer, the SELEX method is a method comprising repeating a series of cycles of “selecting an RNA molecule bound to a BSCE marker protein as a target molecule from an RNA pool composed of many RNA molecules having a random sequence region and primer binding regions at both ends of the random sequence region, amplifying the recovered RNA molecule by an RT-PCR reaction, conducting transcription using the obtained cDNA molecule as a template to obtain amplification products of the selected RNA molecule, and preparing an RNA pool of the amplification products for the next round” for several rounds to several tens of rounds, thereby selecting RNA molecules having stronger ability to bind to a target molecule. Meanwhile, in the case of separating DNA aptamer, the SELEX method is a method comprising repeating a series of cycles of “selecting a DNA molecule bound to a BSCE marker protein as a target molecule from a DNA pool composed of many DNA molecules having a random sequence region and primer binding regions at both ends of the random sequence region, amplifying the selected DNA molecule by a PCR reaction, and preparing a DNA pool of the amplification products for the next round” for several rounds to several tens of rounds, thereby selecting a DNA molecule having stronger ability to bind to a target molecule. The nucleotide sequence lengths of the random sequence region and the primer binding region are not particularly limited. In general, preferably, the random sequence region is in the range of 20 to 80 bases, and the primer binding region is in the range of 15 to 40 bases. To increase the specificity to a target molecule, a molecule similar to the target molecule may be mixed with an RNA pool or an RNA pool in advance, resulting in a pool consisting of RNA molecules or DNA molecules that do not bind to the target molecule, and this resulted pool may be used. The nucleic acid molecules eventually obtained by the above method are used as nucleic acid aptamers of this aspect. The SELEX method is a known method, and therefore, it can be specifically carried out in accordance with, for example, Pan et al. (Proc. Natl. Acad. Sci. 1995, U.S.A. 92: 11509-11513).

[0201] A nucleic acid aptamer for use in this step can also be labeled with a labeling substance such as a fluorescent substance. Regarding type of the labeling substance, any of the above-described labeling substances can be used as long as it does not inhibit the ability to bind to a target molecule. In addition, as in a case in which a reagent for differentiating basaloid squamous cell carcinoma of the esophagus is the above-described probe, a nucleic acid aptamer can also be provided in a state of being immobilized to a solid support. Material of the solid support to immobilize a nucleic acid aptamer is not limited. For example, it is possible to use the same material as the substrate described above.

### (2-2) Measurement of Protein Activity

[0202] For measurement of activity of a protein, a measurement method corresponding to activity of the protein is employed. For example, in a case in which a BSCE marker protein binds to another substance so as to function, as in a relationship between a peptide and a protein, such as a ligand and a receptor or a transcription factor and DNA, a low molecular weight compound and a protein, or a protein and a nucleic acid, binding activity of a BSCE marker protein maybe measured. A specific example of measuring binding activity is a measurement method using the surface plasmon resonance method or the quartz crystal microbalance method described above. For example, in a case in which a BSCE marker protein is a transcription factor, activity of the BSCE marker protein can be measured by immobilizing target DNA sequence on the metal thin film surface and distributing a sample collected from a subject, a healthy subject, or a group of healthy subjects that may include a BSCE marker protein on the metal thin film surface, thereby detecting the amount of the BSCE marker protein bound to the target DNA sequence. Further, in a case in which a BSCE marker protein functions as an enzyme, catalytic activity thereof can be measured by adding a substrate.

### 2-2-2. Calculation Step

[0203] The term “calculation step” refers to a step of calculating particular values based on measurement values obtained in the measurement step. This step includes two independent steps, which are a combined value calculation step and an average measurement value calculation step, and either or both of the steps can be selected.

### (a) Combined Value Calculation Step

[0204] In the combined value calculation step, the expression ratio of each of genes for differentiating BSCE included in BSCE markers based on the measurement values obtained in the measurement step is calculated, thereby obtaining the combined value thereof. The term “gene expression ratio” used herein refers to a ratio calculated based on the measurement values for a test subject and a healthy subject or a group of healthy subjects obtained in the measurement step for each of genes included in BSCE markers. The expression ratio is calculated as a ratio relative to a sample common to all specimens (hereinafter referred to as “common reference”). The common reference for calculation of the expression ratio may be anything as long as it is common to all specimens. For example, it may be a particular cell line or a mixture of a plurality of cell lines. Alternatively, it may be a healthy subject. In such case, it is preferable to adopt a group of a plurality of healthy subjects, although only one healthy subject may be adopted.

[0205] In calculation of the expression ratio, specifically, when, for example, A1 represents a measurement value of a test subject and B1 represents a measurement value of a common reference for the COL9A2 gene, which is included in the group of essential genes for differentiating BSCE for BSCE markers, the expression ratio of the COL9A2 gene is expressed as A1/B1. Similarly, when, for example, A2 represents a measurement value of a test subject and B2 represents a measurement value of a common reference for the FGF3 gene, the expression ratio of the FGF3 gene is expressed as A2/B2. In addition, when A3 represents a measurement value of a test subject and B3 represents a measurement value of a common reference for the NTPX2 gene, the expression ratio of the NTPX2 gene is expressed as A3/B3, when A4 represents a measurement value of a test subject and B4 represents a measurement value of a common reference for the COL9A3 gene, the expression ratio of the COL9A3 gene is expressed as A4/B4, and when A5 represents a measurement value of a test subject and B5 represents a measurement value of a common reference for the COL9A1 gene, the expression ratio of the COL9A1 gene is expressed as A5/B5. In this case, the combined value of the expression ratios obtained in this step is expressed as A1/B1+A2/B2+A3/B3+A4/B4+A5/B5. When calculating the expression ratio between a subject and the common reference, it is possible to calculate an average measurement value for samples contained in the common reference in advance and calculate the expression ratio based on the average measurement value and the measurement value of a test subject. For example, in a case in which each specimen contained in the common reference consists of Ba, Bb, Bc, and Bd, if the measurement values of the COL9A2 gene are represented by Ba1, Bb1, Bc1, and Bd1, the gene expression ratio of the COL9A2 gene is expressed as 4A1/(Ba1+Bb1+Bc1+Bd1). In a case in which BSCE markers include a group of selected genes for differentiating BSCE in addition to a group of essential genes for differentiating BSCE, the expression ratios of the selected genes for differentiating BSCE are also calculated and combined. The expression ratio of each gene for differentiating BSCE can also be expressed as B/A.

### (b) Average Measurement Value Calculation Step

[0206] In the average measurement value calculation step, an average measurement value for the group of genes for differentiating BSCE included in BSCE markers is calculated based on the measurement values obtained in the measurement step for each of the group of test subjects and the group of healthy subjects. In addition, an average measurement value for the group of genes for differentiating BSCE included in BSCE markers is calculated for each of healthy subjects constituting the group of healthy subjects. In a case in which, for example, BSCE markers include 7 kinds of genes for differentiating BSCE including a group of essential genes for differentiating BSCE, the average measurement value can be calculated by dividing the sum of the measurement values of the respective genes for differentiating BSCE by 7 that is the number of the kinds of genes. In the average measurement value calculation step, in principle, an average measurement value is calculated. However, if necessary, the sum of the respective measurement values of the test subject and the group of healthy subjects, which means the value obtained before dividing the sum by the number of kinds of genes for differentiating BSCE included in BSCE markers, can be calculated.

### 2-2-3. Determination Step

[0207] The term “determination step” refers to a step of determining contraction of BSCE in a test subject based on the values obtained in the calculation step. In this step, determination is carried out by different methods based on the values obtained in two steps in the calculation step, which means the combined value calculation step and the average measurement value calculation step.

### (a) Determination Based on the Values Obtained in the Combined Value Calculation Step

[0208] When the combined value calculation step is conducted in the calculation step, if the resulting combined value exceeds a predetermined cutoff value derived from an ROC curve, it is determined that the subject is highly likely to have BSCE.

[0209] A “receiver operating characteristic (ROC) curve” is created by plotting with a vertical axis representing the true position fraction (TPF), i.e., sensitivity and a horizontal axis representing the false position fraction (FPF), i.e., (1-specificity) while changing the cutoff point as a parameter, wherein the cutoff point represents the threshold value for judging the result of the test as positive. Specificity means a rate at which a negative subject is accurately determined to be negative.

[0210] It is possible to decide based on the created ROC curve which cutoff point is adopted as a cutoff value in consideration of the severity of disease, the significance of the test, and other various conditions. In general, when a cutoff point is determined to be a low point of a false positive rate, the number of healthy subjects to be positive decreases, whereas many patients having the disease are excluded, resulting in a decreased sensitivity. Conversely, when sensitivity is increased, the false positive rate for healthy subjects increases. In general, to increase both sensitivity and specificity (toward 1), the cutoff value may be set to a value giving a point closest to the point (0, 1) on the ROC curve. In a situation in which a test is performed as a screening test prior to a highly invasive test such as biopsy, the cutoff value may be set such that the sensitivity becomes high in order to reduce false-negative results.

### (b) Determination Based on the Values Obtained in the Average Measurement Value Calculation Step

[0211] When the average measurement value calculation step is performed in the calculation step, in a case in which the average measurement value of the test subject is statistically significantly larger than the obtained the average measurement value of the group of healthy subjects or the group of non-BSCE esophageal cancer patients, it is determined that the test subject is highly likely to have basaloid squamous cell carcinoma of the esophagus.

[0212] The term “statistically significant” used herein mean that when the difference between a test subject and a group of healthy subjects or a group of non-BSCE esophageal cancer patients is statistically processed, there is a significant difference therebetween. For example, a case in which the risk rate (significance level) of the resulting value is small, specifically, a case in which the risk rate is less than 5% (p<0.05), less than 1% (p<0.01), or less than 0.1% (p<0.001) is exemplified. The “p (value)” specified herein means a probability that a hypothesis is accidentally judged as correct in a statistical test, assuming a distribution of a statistic. Therefore, a smaller “p” means that a hypothesis is more likely to be true. A statistical test to be used is not particularly limited, and thus a known test by which the presence or absence of statistical significance can be determined may be used as appropriate. For example, the Student's t-test, covariate analysis of variance, etc. may be employed.

[0213] As specified herein, in a case in which there is a statistically significant difference in a comparison between the average measurement value of a test subject and that of a group of healthy subjects or a non-BSCE esophageal cancer patients, it is determined that the test subject is affected with BSCE. For example, when the average measurement value of a test subject is 1.5 times or more, 2.0 times or more, 3.0 times or more, 4 times or more, 5 times or more, or 6 times or more than that of a group of healthy subjects or a non-BSCE esophageal cancer patients, it can be usually considered that there is a statistically significant difference.

### 2-3. Advantageous Effects

[0214] According to the method for differentiating contraction of BSCE in this aspect, by examining a specimen excised by biopsy or surgery, a test subject who has provided the specimen can be provided with an accurate differential diagnosis indicating whether the test subject is affected with BSCE or another esophageal cancer. It becomes possible to provide a definitive diagnosis by the method for differentiating contraction of BSCE in this aspect with high accuracy of diagnosis, which is advantageous in that it is possible to recognize that the pathological conditions are different from those of usual kinds of esophageal squamous cell carcinoma and consider a decision on the recurrence risk or a treatment method to cope with BSCE.

[0215] In addition, reliable diagnosis of BSCE and the progress in accumulation of cases based on the diagnosis make it possible to understand further pathological conditions of BSCE as a rare disease and derive the optimal therapy. Further, it can contribute to the improvement of prognosis of BSCE that is usually accompanied by poor prognosis.

[0216] Conventionally, BSCE has been judged based on pathologic diagnosis while there has been a difference between physicians who judge diagnostic results or between hospitals. However, according to the method for differentiating contraction of BSCE in this aspect, it is possible to provide objective data to assist BSCE diagnosis.

### 3. Reagent for Detecting Basaloid Squamous Cell Carcinoma of the Esophagus

### 3-1. Outline

[0217] The third aspect of the present invention relates to a reagent for detecting basaloid squamous cell carcinoma of the esophagus (BSCE). The BSCE detection reagent in this aspect enables differentiating an esophageal cancer of a test subject as basaloid squamous cell carcinoma of the esophagus or another esophageal cancer by, for example, applying the reagent to a sample derived from the test subject affected with the esophageal cancer.

### 3-1-1. Constitution

[0218] The BSCE detection reagent in this aspect consists of a set of probes or primers for detecting transcription products (i.e., mRNAs or cDNAs) of genes for differentiating BSCE included in BSCE markers or antibodies or nucleic acid aptamers for detecting BSCE marker proteins. A specific constitution thereof is described in the measurement step of the second aspect. For example, in a case in which transcription products of a group of 5 kinds of essential genes for differentiating BSCE included in BSCE markers are detected, the BSCE detection reagent may contain a group of probes consisting of the nucleotide sequences shown in SEQ ID NOs: 141 to 145 (including complementary sequences). In this case, the BSCE detection reagent may further contain one or more probes consisting of the nucleotide sequences shown in SEQ ID NOs: 146 to 148. More preferably, the BSCE detection reagent may contain one or more probes consisting of the nucleotide sequences shown in SEQ ID NOs: 149 to 153 and still more preferably one or more probes consisting of the nucleotide sequences shown in 154 to 210.

[0219] In a case in which the BSCE detection reagent in this aspect is formed with the above-described probes, a reagent for differentiating BSCE may be provided in a state in which each probe is immobilized on a substrate to form a DNA microarray or a DNA microchip. Although material of the substrate for immobilizing each probe is not limited, a glass plate, a quartz plate, a silicon wafer, or the like is usually used. The size of the substrate is, for example, 3.5 mm×5.5 mm, 18 mm×18 mm, or 22 mm×75 mm, which can be set variously depending on the number of spots and spot sizes for each probe. For a probe, 0.1 μg to 0.5 μg of nucleotides is usually used per spot. Examples of a method for immobilizing nucleotides include: a method in which nucleotides are electrostatically bound to a solid-phase support surface-treated with a polycation such as polylysine, poly-L-lysine, polyethyleneimine, or polyalkylamine with the use of charges of nucleotides; and a method in which nucleotides, into which a functional group such as an amino group, an aldehyde group, an SH group, or biotin has been introduced, are covalently bound to the surface of a solid phase, onto which a functional group such as an amino group, an aldehyde group, or an epoxy group has been introduced.

[0220] In addition, in a case in which the BSCE detection reagent in this aspect is an antibody or a fragment thereof which recognizes a BSCE marker protein in a specific period of time, the reagent for differentiating BSCE can be provided in a state of being immobilized on a solid-phase support. Examples of the solid-phase support that can be used include insoluble supports in the form of beads, microplates, test tubes, sticks, or test pieces made of materials such as polystyrene, polycarbonate, polyvinyl toluene, polypropylene, polyethylene, polyvinyl chloride, nylon, polymethacrylate, latex, gelatin, agarose, cellulose, sepharose, glass, metals, ceramics, or magnetic substances. Immobilization may be carried out by binding the solid-phase support with an antibody or a fragment thereof by a known method such as a physical adsorption method, a chemical binding method, or a combination method thereof.

### 3-2. Advantageous Effects

[0221] It is possible to objectively and accurately determine whether or not a test subject having a past history of an esophageal cancer is or was affected with BSCE, whether such test subject is affected with BSCE or another major esophageal cancer other than BSCE, or whether or not a test subject suspected of being affected with esophageal cancer is affected with BSCE by applying the BSCE detection reagent in this aspect to a test subject having a past history of an esophageal cancer or a test subject suspected of being affected with esophageal cancer. In particular, the use of BSCE detection reagent in this aspect enables readily differentiating BSCE from esophageal squamous cell carcinoma, which has been difficult based on conventional pathological diagnosis.

### 4. Kit for Detecting Basaloid Squamous Cell Carcinoma of the Esophagus

### 4-1. Outline

[0222] The fourth aspect of the present invention relates to a kit for detecting basaloid squamous cell carcinoma of the esophagus (BSCE). The BSCE detection kit of the present invention includes, as an essential component, the BSCE detection reagent in the third aspect.

### 4-2. Constitution

[0223] The constitution of the BSCE detection reagent in the third aspect, which is included in the BSCE detection kit of the present invention, is not particularly limited, and thus, it is consisted of any of a set of probes or primers, antibodies, and nucleic acid aptamers. It is preferred that each of these can detect transcription products or translation products of a group of at least 5 kinds of essential genes for differentiating BSCE included in BSCE markers. It is preferable that each can detect one or more of 3 kinds of selected genes for differentiating BSCE comprising the nucleotide sequences shown in SEQ ID NOs: 146 to 148, more preferably one or more of 5 kinds of selected genes for differentiating BSCE comprising nucleotide sequences shown in SEQ ID NOs: 149 to 153, and further preferably one or more of 57 kinds of selected genes for differentiating BSCE comprising nucleotide sequences shown in SEQ ID NOs: 154 to 210. It is also possible that combinations of a set of probes or primers, antibodies, nucleic acid aptamers, etc. are included.

[0224] The BSCE detection kit of the present invention may include other reagents necessary for detecting a BSCE marker such as a buffer, a secondary antibody, instructions for detection and differentiation of results, in addition to the BSCE detection reagent in the third aspect.

### EXAMPLES

[0225] Hereinafter, the present invention will be described more specifically with reference to Examples. However, the scope of the present invention is not intended to be limited by these Examples.

### Example 1

### (Object)

[0226] Genes for differentiating BSCE to be included in BSCE markers are identified.

### (Method and Results)

### 1. Biological Samples

### 1-1. Subjects

[0227] Subjects were 98 patients selected among esophageal cancer patients from whom the consent on this study was obtained at the Department of Regenerative Surgery, Fukushima Medical University during a period between January 2008 and July 2015, from whom it was possible to collect biological samples by surgery or endoscopic biopsy.

### 1-2. Method for Collecting Biological Samples

[0228] (1) Regarding a surgical specimen, a specimen having a size of about 7×7 mm was collected as a sample from a lesion and from a normal site at least 5 cm apart from the lesion immediately after cancer removal, and then, placed in a freezing tube and frozen in liquid nitrogen. The remaining cancer specimen was formalin-fixed paraffin-embedded (FFPE) to prepare sections. The sections were subjected to pathological diagnosis. The number of surgical specimens was 57 samples including 7 samples diagnosed as BSCE.

[0229] (2) Regarding a biopsy specimen, a specimen having a size of about 3×3 mm was collected as a sample from a lesion and from a normal site using biopsy forceps (OLYMPUS FB-230K) during upper gastrointestinal endoscopy, and then, placed in a freezing tube and frozen in liquid nitrogen. In addition, a specimen was again collected from a lesion site, which is as close to the site for collecting specimen to be frozen as possible, and formalin-fixed. Thereafter, FFPE sections were prepared and subjected to pathological diagnosis described later.

### 1-3. Obtainment of FFPE Tissue

[0230] As a sample for verification, 20 specimens of FFPE tissue marketed as “basaloid squamous cell carcinoma of the esophagus” from USbiomax, Inc. were purchased.

### 1-4. Pathological Diagnosis

[0231] Pathological sections were prepared from the FFPE sections prepared in “1-2. Method for collecting biological samples” (FFPE tissue) or the FFPE tissue purchased in “1-3. Obtainment of FFPE tissue.” The pathological sections were stained with hematoxylin and eosin (HE) and two pathologists independently performed a histopathological diagnosis. Pathological diagnosis was given in accordance with pathological standards presented by Wain et al., and six patterns of the pathological conditions presented by Imamhasan et al. (Imamhasan A., et al., 2012, Human Pathology 43:2012-2023) were used for reference. The six patterns are the following A to F.

[0232] (A) Solid nest with comedo-type necrosis

[0233] (B) Cribriform pattern and pseudoacini formation

[0234] (C) Ductal differentiation

[0235] (D) Small nests with a microcystic and/or trabecular pattern

[0236] (E) Hyaline-like material deposition

[0237] (F) Coexistence of invasive SCC component Each case was diagnosed in a comprehensive manner in consideration of the incidence rates of observations of A to F above as well. In this Example, a specimen partially containing components of basaloid squamous cell carcinoma of the esophagus was determined as basaloid squamous cell carcinoma of the esophagus even when the specimen is mainly composed of components of squamous cell carcinoma.

[0238] Pathological images were taken using an HS all-in-one fluorescence microscope BZ-9000 (KEYENCE, Osaka, Japan). Image processing was carried out using Illustrator (Adobe System Inc., CA, USA).

### 1-5. Classification of Specimens

[0239] Maker genes for differentiating BSCE from other esophageal cancers were extracted from the surgical specimens described above. Specifically, the extraction was conducted as follows.

[0240] Of 98 patients, there were 18 patients from whom only surgical specimens were collected, 68 patients from whom only biopsy specimens were collected, and 12 patients from whom both surgical specimens and biopsy specimens were collected. As a result of pathological and histopathological examination, only 7 out of 98 patients were diagnosed as BSCE. Gene expression analysis was conducted by collecting a plurality of specimens (surgical specimens and biopsy specimens) from each individual. There were 369 specimens in total from which sufficient amounts of RNAs were obtained and for which comprehensive gene expression analysis could be conducted. The 369 specimens consisted of 57 surgical specimens and 312 biopsy specimens. The surgical specimens consisted of 26 specimens of normal esophageal epithelium, 23 specimens of esophageal squamous cell carcinoma, 7 specimens of basaloid squamous cell carcinoma of the esophagus (BSCE), and 1 specimen of endocrine cell carcinoma of the esophagus. The biopsy specimens consisted of 229 specimens of normal esophageal epithelium, 51 specimens of squamous cell carcinoma, 8 specimens of BSCE, 1 specimen of endocrine cell carcinoma, 21 specimens of adenocarcinoma, and 2 specimens of intraepithelial tumor.

[0241] Table 2 describes clinicopathological characteristics of BSCE patients who underwent surgery. The patients were 5 male (M) cases and 1 female (F) case, whose average age was 62.6 years old (55 to 68 years old). There were 3 cases of patients ( 3/6, 50%) who had been diagnosed as BSCE by preoperative biopsy. The average tumor diameter was 28.6 mm (12 mm to 45 mm), and the site where the tumor was located was middle thoracic esophagus in all cases. According to the TNM Stage classification in the 7th edition of UICC, there were 4 cases of stage I, 1 case of stage II, and 1 case of stage III. One of the cases of stage I died from the primary disease in 58 months after surgery. The one case of stage III died from the primary disease in 19 months after surgery. The one case of stage II has been surviving with postoperative recurrence. The three cases of stage I have been surviving without recurrence (observation period of 7 to 60 months).

TABLE 2

| | | | | | | | Size | | Depth | Lymph | | | |
|---|---|---|---|---|---|---|---|---|---|---|---|---|---|
| | | | | | | | of | | of | node | Lymphatic | Venous | |
| | | | Biopsy | Pathological | Postoperative | | Tumor | Tumor | invasion | metastasis | invasion | invasion | UICC |
| No. | Age | sex | diagnosis | diagnosis | treatment | Prognosis | (mm) | type | (pT) | (pN) | (ly) | (v) | Stage |
| 1 | 68 | M | ASC | BSC | CRT | 58 M-Death | 42 | type2 | pT1 | pN0 | 0 | 1 | IA |
| | | | | | | (Lung meta) | | | | | | | |
| 2 | 55 | M | SCC | BSC | None | 60 M-Alive | 30 | type5 | pT1 | pN0 | 0 | 2 | IA |
| 3 | 56 | M | SCC | BSC, SCC | CRT | 19 M-Death | 25 | type3 | pT4 | pN3 | 2 | 2 | IIIC |
| | | | | | | (Lung meta) | | | | | | | |
| 4 | 68 | F | SCC(1st) | BSC | None | 37 M-Alive | 18 | type2 | pT1 | pN0 | 0 | 1 | IA |
| | | | BSC(2nd) | | | | | | | | | | |
| 5 | 64 | M | BSC | BSC, SCC | CRT | 29 M-Alive | 12 | type0-IIa | pT1 | pN1 | 0 | 0 | IIB |
| | | | | | | (LN meta) | | | | | | | |
| 6 | 65 | M | BSC | BSC, SCC | None | 7 M-Alive | 45 | type0-IIc | pT1 | pN0 | 0 | 0 | IA |

ASC: Adeno squamous carcinoma
SCC: Squamous cell carcinoma
BSC: Basaloid squamous cell carcinoma
CT: Chemotherapy
CRT: Chemoradiotherapy

### 2. Preparation of DNA Microarray

[0242] A DNA microarray was prepared using synthetic DNA for microarrays. A DNA microarray for poly(A)+RNA (mRNA) (hereinafter referred to as “System 1”) was prepared by forming an array of 31797 kinds of synthetic DNA (80 mers) corresponding to human-derived transcription products on a microscope slide. In addition, a DNA microarray for total RNA (hereinafter referred to as “System 2”) was prepared by forming an array of 14400 kinds of synthetic DNA (80 mers) corresponding to human-derived transcription products on a microscope slide. As a method for preparing a DNA microarray, the preparation method described in Schena M., et al., 1995, Science, 270:467-470 was referred to. Specifically, a DNA microarray was prepared by printing a human gene fragment library (manufactured by Micro Diagnostic Laboratories) on a microscope slide (manufactured by Matsunami Glass Ind., Ltd., HA-coated microscope slide) using a ultratrace dispenser (manufactured by Micro Diagnostic Laboratories) in accordance with the protocol recommended by the manufacturer. This DNA microarray was allowed to stand for 1 hour at 80° C. in a gas phase incubator and further irradiated with 120-mJ ultraviolet light using a UV cross linker (Hoefer Inc., UVC500). Aftertreatment of the DNA microarray was conducted in accordance with the method described in Japanese Patent No. 4190899.

3. Preparation of Labeled cDNA
3-1. Total RNA Extraction from Frozen Tissue

[0243] Total RNA was extracted from the samples, which had been collected in “1-2. Method for collecting biological samples” and frozen in liquid nitrogen, using ISOGEN (Nippon Gene Co., Ltd.) in accordance with the attached protocol.

3-2. Total RNA Extraction from FFPE

[0244] Total RNA was extracted from the FFPE tissue purchased in “1-3. Obtainment of FFPE tissue” using an ISOGEN PB Kit (Nippon Gene Co., Ltd.) in accordance with the attached protocol.

### 3-3. Purification of Poly(A)+RNA

[0245] Regarding the samples for which 125 μg or more of total RNA was successfully obtained, poly(A)+RNA was subsequently purified therefrom using a MicroPoly(A) purist kit (Ambion, Inc.) in accordance with the attached protocol.

3-4. Preparation of Labeled cDNA

[0246] A specimen-labeled cDNA was prepared by a reverse transcription reaction using the prepared poly(A)+RNA or total RNA as a template. Specifically, 2.0 μg of the poly(A)+RNA or 5.0 μg of the total RNA, SuperScript II (registered trademark) reverse transcriptase (manufactured by Thermo Fisher Scientific Inc.), and Cyanine 5-deoxyuridinetriphosphate (Cyanine 5-dUTP) (manufactured by Perkin Elmer Co., Ltd.) were used for the preparation using a nucleic acid labeling/hybridization reagent (manufactured by Micro Diagnostic Laboratories)

[0247] As a control poly(A)+RNA or total RNA, Human Common Reference (manufactured by Micro Diagnostic Laboratories) was used. Human Common Reference is a mixture of equal amounts of poly(A)+RNA or total RNA prepared from each of 22 kinds of human-derived cell lines (A431 cells, A549 cells, AKI cells, HBL-100 cells, HeLa cells, HepG2 cells, HL60 cells, IMR-32 cells, Jurkat cells, K562 cells, KP4 cells, MKN7 cells, NK-92 cells, Raji cells, RD cells, Saos-2 cells, SK-N-MC cells, SW-13 cells, T24 cells, U251 cells, U937 cells, and Y79 cells).

[0248] Control labeled cDNA, for which the Human Common Reference was used as a template, was prepared as in the specimen-labeled cDNA except that Cyanine 3-deoxyuridinetriphosphate (Cyanine 3-dUTP) (manufactured by Perkin Elmer Corp.) was used as a dye-labeled deoxynucleotide. A specific method for preparing the labeled cDNA was conducted in accordance with the protocol recommended by each manufacturer.

[0249] After the specimen-labeled cDNA and the control labeled cDNA were combined in the same test tube to obtain mixture labeled cDNA, the cDNA was purified using Micropure EZ (manufactured by Merck Millipore) and Microcon YM30 (registered trademark) (manufactured by Merck Millipore). A specific purification method was conducted in accordance with the protocol recommended by the company.

[0250] The purified mixture labeled cDNA was adjusted to 15 μL or 7 μL using a hybridization buffer provided with a nucleic acid labeling/hybridization reagent (manufactured by Micro Diagnostic Laboratories) and pure water to obtain a labeled cDNA solution.

### 4. Hybridization

[0251] The labeled cDNA solution was heated at 99° C. for 5 minutes for heat denaturation to prepare a labeled probe. The labeled probe was added dropwise to the DNA microarray prepared in “1. Preparation of DNA microarray” and the microarray was placed in a hybridization cassette (manufactured by Micro Diagnostic Laboratories). The hybridization cassette was placed in a gas phase incubator (manufactured by Sanyo Biomedical Inc.) and incubated in a stationary state at 42° C. for 20 hours.

[0252] The DNA microarray was removed from the hybridization cassette and washed with a hybridization wash solution provided with the nucleic acid labeling/hybridization reagent (manufactured by Micro Diagnostic Laboratories) in accordance with the protocol recommended by the company.

### 5. Selection of Markers for Differentiating Basaloid Squamous Cell Carcinoma of the Esophagus

### 5-1. Measurement of the Gene Expression Level

[0253] The expression level of each gene was determined based on fluorescence intensity of the labeled probe bound to oligo DNA immobilized to the microarray in “4. Hybridization.” Fluorescence on the DNA microarray after washing was measured using a Scanner GenePix 4000B (manufactured by Axon Instruments Inc.). Thereafter, the fluorescence was optically evaluated using the analysis software GenePixPro (manufactured by Axon Instruments Inc.) supplied with the scanner, thereby quantifying the relative value of fluorescence intensity. Specifically, fluorescence intensity (Cyanine 5 fluorescence intensity) from specimen-labeled cDNA and fluorescence intensity (Cyanine 3 fluorescence intensity) from control labeled cDNA were measured at each oligo DNA spot fixed on the DNA microarray and the Cyanine 5/Cyanine 3 fluorescence intensity ratio (logarithmic transformed relative expression ratio: log 2 ratio) at each spot was calculated, thereby correcting (scaling) the level of gene expression between spots. In addition, the background was calculated from the fluorescence intensities at sites other than the spots on the DNA microarray, and it was subtracted as the noise from the fluorescence intensity ratio of each spot.

5-2. Extraction of the Group of Genes as Markers for Differentiating BSCE from Other Esophageal Cancers

[0254] Gene expression profiles were obtained from 57 surgical specimens including 7 specimens pathologically diagnosed as BSCE using a DNA microarray. From the gene expression profiles, 14400 genes were extracted which were present on both the System 1 DNA microarray and the System 2 DNA microarray in common. Next, genes for which fluorescent intensities were below the detection limit in 2 or more specimens among the 7 specimens pathologically diagnosed as basaloid squamous cell carcinoma of the esophagus were excluded. Subsequently, a group of genes meeting a requirement that the logarithmic transformed relative expression ratio was not less than 1 or not more than −1 in at least 1 out of 57 specimens was extracted. Further, the average value of logarithmic transformed relative expression ratios of all specimens was calculated for each gene, and a group of genes each having a difference between the average value and its ratio of not less than 1 or not more than −1 for at least one specimen was extracted (7379 genes). Based on the values of the logarithmic transformed relative expression ratio for the group of genes, cluster analysis was conducted in the two-dimensional direction.

[0255] “Cluster analysis” is a statistical technique for grouping genes or samples having similar gene expression patterns. It is possible to group samples having similar gene expression patterns by defining similarity between data (e.g., Euclidean distance) and using the degree of similarity. Hierarchical cluster analysis can also be carried out using analysis software products such as “Expression View Pro” (Micro Diagnostic Laboratories), “GeneMaths XT” (Infocom, Inc.), “GeneSpring” (Agilent Technologies, Inc.), “treeview” (Stanford University), and MicroArray Data Analysis tool (Filgen, Inc.). It is possible to determine the presence or absence of BSCE contraction by constructing in advance a discriminant analysis model for differentiating BSCE from other esophageal cancers and inputting data on the gene expression profiles obtained from test subjects into the discriminant analysis model. For example, cluster analysis is conducted with the addition of gene expression data from a new test subject currently affected with an esophageal cancer to the discriminant analysis model consisting of two clusters of those having a history of an esophageal cancer, which have been found to be a BSCE group and a group of other esophageal cancers, so as to determine whether the new test subject is classified into the group of BSCE or the group of other esophageal cancers. Moreover, it is also possible to determine the presence or absence of BSCE contraction by, for example, obtaining a discriminant through discriminant analysis, associating fluorescence intensity with contraction of BSCE, and inputting a pattern of digitalized expression signals of a test subject into the discriminant.

[0256] FIG. 1 shows the results. As a result of cluster analysis, 57 specimens were classified into a cluster formed with 6 out of 7 BSCE specimens (hereinafter referred to as a “BSCE cluster”), a cluster mainly formed with squamous cell carcinoma specimens (hereinafter referred to as a “squamous cell carcinoma cluster”), and a cluster mainly including normal specimens (hereinafter referred to as a “normal specimen cluster”). Note that since there was only 1 specimen of endocrine cell carcinoma, it could not be said that it was classified into a cluster.

[0257] The average measurement value of logarithmic transformed relative expression ratios of 6 specimens of basaloid squamous cell carcinoma of the esophagus (hereinafter referred to as a “BSCE specimen group”) included in the BSCE cluster was calculated, and a gene group, for which the value was found to be 1 or more, was extracted. Next, among 50 specimens remaining after excluding 1 specimen of BSCE that was not included in the BSCE cluster from the remaining specimens (hereinafter referred to as a “non-BSCE specimen group”), a gene group, for which fluorescence intensity was not more than the detection limit for at least 26 specimens, was excluded. The standard deviation of the logarithmic transformed relative expression ratio for the non-BSCE specimen group was calculated, and a gene group, for which the value was found to be less than 0.5, was extracted. Next, a gene group, for which the average value of the logarithmic transformed relative expression ratio for the BSCE specimen group was larger by 1 or more than the average value of the logarithmic transformed relative expression ratio for the non-BSCE specimen group, was extracted. Further, two-group comparison between the BSCE specimen group and the non-BSCE specimen group was conducted by t-test, and a gene group, for which the P value was found to be less than 0.01, was extracted. As a result, the obtained 70 kinds of genes described in Table 1 were identified as a “group of genes for differentiating BSCE” included in the BSCE markers of the present invention.

[0258] An ROC curve was created to verify whether it would be possible for a BSCE marker to differentiate BSCE using a group of all 70 kinds of genes for differentiating BSCE as BSCE markers. FIG. 2 (A) shows the results. The area of the curve, i.e., area under the curve (hereinafter referred to as “AUC”) was 1.0000 for surgical specimens. In addition, a sensitivity-specificity curve was created using BSCE markers (70 genes) for verification. When the cutoff value was set to 17.2912 corresponding to a point at the intersection of sensitivity with specificity for surgical specimens, sensitivity (=specificity) was 1.0000 as shown in FIG. 2 (B). These results suggest that BSCE can be differentiated with high accuracy using the BSCE markers of the present invention.

[0259] Next, the sum of the logarithmic transformed relative expression ratios of BSCE markers (a group of 70 genes) in each specimen (hereinafter referred to as “expression scores of 70 genes”) were calculated, and 70 kinds of genes for differentiating BSCE were re-aligned in the ascending order of the expression scores of 70 genes. FIG. 2 (C) shows the results. The results also verified that BSCE can be differentiated with high accuracy by setting the cutoff value represented by a border line in the figure using BSCE markers.

### Example 2

### (Object)

[0260] Efficacy for differentiating BSCE with BSCE markers is verified for biopsy specimens.

### (Method and Results)

[0261] An ROC curve was created by combining the expression scores of 70 genes for specimens (57 specimens) and the expression scores of 70 genes for biopsy specimens for verification. Regarding the expression scores of 70 genes for biopsy specimens, gene expression profiles were obtained from 312 biopsy specimens collected in Example 1 using a DNA microarray, the profiles were converted into logarithmic transformed relative expression ratios, and then, data on BSCE markers (a group of 70 genes) were extracted, thereby calculating the expression scores of 70 genes for the group of all 70 kinds of genes for differentiating BSCE. As a result, AUC was 0.9927 as shown in FIG. 2 (D). In addition, a sensitivity-specificity curve was created by combining surgical specimens (57 specimens) and biopsy specimens (312 specimens) using BSCE markers (a group of 70 genes) for verification. As a result, as shown in FIG. 2 (E), when the cutoff value was set to 33.1368, sensitivity was 0.9333 and specificity was 0.9915. These results revealed that BSCE in biopsy specimens can be differentiated with high accuracy using the BSCE markers of the present invention.

[0262] Further, biopsy specimens (312 specimens) and surgical specimens (57 specimens) were combined, and they were re-aligned in the ascending order of expression scores of 70 genes. As a result, as shown in FIG. 2 (F), BSCE can be differentiated with high accuracy by setting the cutoff value represented by a border line in the figure using BSCE markers even when biopsy specimens and surgical specimens are combined.

[0263] Note that BSCE could not be differentiated at 100% sensitivity and specificity when biopsy specimens were used for verification. However, in the case of using biopsy specimens, specimens subjected to histopathological tests and specimens subjected to gene expression analysis were not obtained by dividing a tissue at the same site into two portions, meaning that their sites were merely adjacent to each other and thus they were different. BSCE is often covered by a portion of squamous cell carcinoma or coexists with the same lesion of squamous cell carcinoma. Therefore, even a biopsy specimen from a patient diagnosed as BSCE by histopathological tests might not contain components of BSCE, or vice versa. However, it does not mean that the method for differentiating contraction of BSCE of the present invention cannot be applied to biopsy specimens. In fact, in patients whose surgical specimens were pathologically diagnosed as having a tumor mainly composed of squamous cell carcinoma but also having BSCE at about 10%, among preoperative biopsy specimens (3 specimens), 2 specimens were diagnosed as BSCE and the remaining 1 specimen was diagnosed as squamous cell carcinoma. Further, portions in the vicinity of such specimens were verified using the expression scores of 70 genes. It was determined that one of the former specimens and the one latter specimen were found to be BSCE.

### Example 3

### (Object)

[0264] Efficacy for differentiating BSCE with BSCE markers was verified for FFPE tissues.

### (Method and Results)

[0265] As FFPE tissue specimens for testing BSCE markers, the above-described 20 FFPE tissue specimens purchased from USbiomax, Inc. were used. As a result of reexamining all FFPE tissues for pathological diagnosis, it was found that 13 specimens had basaloid squamous cell carcinoma of the esophagus, 2 specimens had squamous cell carcinoma, and 5 specimens had endocrine cell carcinoma.

[0266] Gene expression profiles were obtained from these FFPE tissue specimens using a DNA microarray, the profiles were converted into logarithmic transformed relative expression ratios, and then, data on BSCE markers (a group of 70 genes) were extracted, thereby calculating the expression scores of 70 genes. An ROC curve was created by combining surgical specimens (57 specimens) and FFPE tissue specimens (20 specimens) to verify whether it would be possible to differentiate BSCE in an FFPE tissue specimen using BSCE markers (a group of 70 genes). As a result, AUC was 0.9930 as shown in FIG. 2 (G). In addition, a sensitivity-specificity curve was created by combining surgical specimens (57 specimens) and FFPE tissue specimens (20 specimens) using BSCE markers (a group of 70 genes) for verification. As a result, as shown in FIG. 2 (H), when the cutoff value was set to 34.7723, sensitivity was 0.9000 and specificity was 0.9825. These results revealed that BSCE in FFPE tissue specimens can be differentiated with high accuracy using the BSCE markers of the present invention.

[0267] Further, FFPE tissue specimens (20 specimens) and surgical specimens (57 specimens) were combined, and they were re-aligned in the ascending order of expression scores of 70 genes. As a result, as shown in FIG. 2 (I), BSCE can be differentiated with high accuracy by setting the cutoff value represented by a border line in the figure using BSCE markers even when FFPE tissue specimens and surgical specimens are combined.

### Example 4

### (Object)

[0268] Efficacy of differentiating BSCE based on group scatter diagrams using surgical specimens, biopsy specimens, and FFPE specimens is verified.

### (Method and Results)

[0269] A group scatter diagram was created based the expression scores of 70 genes as BSCE markers (a group of 70 genes) by combining all of surgical specimens, biopsy specimens, and FFPE tissue specimens. As a result, as shown in FIG. 2 (J), the average value of the non-BSCE specimen group was 8.970, and the average value of the BSCE specimen group was 70.549. There was a statistically significant difference (P=1.43×10⁻⁹) between both groups.

[0270] Next, a group scatter diagram was created separately for each specimen type. FIG. 2 (K) shows the results. For surgical specimens, the average value of the non-BSCE specimen group was 6.808, and the average value of the BSCE specimen group was 108.715. There was a statistically significant difference (P=0.0004) between both groups. For biopsy specimens, the average value of the non-BSCE specimen group was 8.878, and the average value of the BSCE specimen group was 72.764. There was a statistically significant difference (P=0.0012) between both groups. For FFPE tissue specimens, the average value of the non-BSCE specimen group was 28.389, and the average value of the BSCE specimen group was 48.635. In addition, there was a statistically significant difference (P=0.0003) between both groups.

[0271] The above results verified that BSCE can be differentiated with high accuracy by determining the expression levels of BSCE markers.

### Example 5

### (Object)

[0272] A group of essential genes for differentiating BSCE is selected from BSCE markers.

### (Method and Results)

[0273] Priority ranking was made using the 70 kinds of genes for differentiating BSCE identified in Example 1 in consideration of the difference in the average value between the BSCE specimen group and the non-BSCE specimen group, standard deviation, P value of the t-test, score values for the BSCE specimen group and clusters formed by cluster analysis. As a result, it was revealed that the group of 5 kinds of genes for differentiating BSCE represented by NOs: R-1 to R-5 in Table 1 can differentiate the BSCE specimen group and the non-BSCE specimen group.

[0274] After gene expression profiles were obtained using a DNA microarray, the profiles were converted into logarithmic transformed relative expression ratios, gene expression data of 5 kinds of genes for differentiating BSCE constituting the above-described group of essential genes for differentiating BSCE were extracted to calculate the sum (hereinafter referred to as “expression scores of 5 genes”), and an ROC curve was created using the sum, i.e., the values of the expression scores of 5 genes. As a result, as shown in FIG. 3 (A), AUC was 1.0000 for surgical specimens alone. In addition, as shown in FIG. 3 (C), AUC was 0.9533 for surgical specimens and biopsy specimens, and as shown in FIG. 3 (E), AUC was 0.9737 for surgical specimens and FFPE tissue specimens.

[0275] Next, a sensitivity-specificity curve was created for verification. As a result, as shown in FIG. 3 (B), both sensitivity and specificity were 1.0000 for surgical specimens alone when the cutoff value was set to 2.7064. In addition, as shown in FIG. 3 (D), when the cutoff value was set to 4.1997, sensitivity was 0.9333 and specificity was 0.9718 for surgical specimens and biopsy specimens. Further, as shown in FIG. 3 (F), when the cutoff value was set to 6.3559, sensitivity was 0.9500 and specificity was 0.9123 for surgical specimens and FFPE tissue specimens.

[0276] Subsequently, surgical specimens alone (FIG. 3 (G)), surgical specimens and biopsy specimens (FIG. 3 (H)), and surgical specimens and FFPE tissue specimens (FIG. 3 (I)) were re-aligned in the ascending order of the expression scores of 5 genes using the expression scores of 5 genes for the above-described 5 kinds of genes for differentiating BSCE. As a result, it was revealed that the BSCE specimen group and the non-BSCE specimen group can be differentiated by setting a certain cutoff value regardless of specimens.

[0277] Further, a group scatter diagram was created from all analyzed specimens using the expression scores of 5 genes for the above-described 5 kinds of genes for differentiating BSCE. FIG. 3 (J) shows the results. The average value of the non-BSCE specimen group was 1.052, and the average value of the BSCE specimen group was 10.496. There was a statistically significant difference (P=1.61×10⁻¹¹) between both groups.

[0278] Subsequently, a group scatter diagram was created separately for each specimen type. FIG. 3 (K) shows the results. For surgical specimens, the average value of the non-BSCE specimen group was −0.967, and the average value of the BSCE specimen group was 13.200. There was a statistically significant difference (P=0.0003) between both groups. For biopsy specimens, the average value of the non-BSCE specimen group was 1.240, and the average value of the BSCE specimen group was 9.801. There was a statistically significant difference (P=0.0048) between both groups. For FFPE tissue specimens, the average value of the non-BSCE specimen group was 7.320, and the average value of the BSCE specimen group was 9.468. There was a statistically significant difference (P=0.0265) between both groups.

[0279] The above results indicated that even BSCE markers consisting of the group of 5 kinds of genes for differentiating BSCE shown in NOs: R-1 to R-5 in Table 1 can also differentiate the BSCE specimen group and the non-BSCE specimen group. Thus, the group of 5 genes for differentiating BSCE was designated as a group of essential genes for differentiating BSCE.

### Example 6

### (Object)

[0280] A group of genes for differentiating BSCE is narrowed down from BSCE markers. [1]

### (Method and Results)

[0281] Priority ranking was made using the 70 kinds of genes for differentiating BSCE identified in Example 1 in consideration of the difference in the average value between the BSCE specimen group and the non-BSCE specimen group, standard deviation, P value of t-test, score values for the BSCE specimen group and clusters created by cluster analysis. As a result, it was revealed that even a group of 8 kinds of genes for differentiating BSCE, including 3 kinds of selected genes for differentiating BSCE represented by NOs: R-6 to R-8 in Table 1 in addition to the group of essential genes for differentiating BSCE, can differentiate the BSCE specimen group and the non-BSCE specimen group.

[0282] The basic procedures were conducted as in Example 5. An ROC curve was created from the sum obtained by extracting gene expression data of 8 kinds of genes for differentiating BSCE to calculate the sum (hereinafter referred to as “expression scores of 8 genes”), i.e., expression scores of 8 genes. As a result, as shown in FIG. 4 (A), AUC was 1.0000 for surgical specimens alone. In addition, as shown in FIG. 4 (C), AUC was 0.9364 for surgical specimens and biopsy specimens, and as shown in FIG. 4 (E), AUC was 0.9693 for surgical specimens and FFPE tissue specimens.

[0283] Next, a sensitivity-specificity curve was created for verification. As a result, as shown in FIG. 4 (B), both sensitivity and specificity were 1.0000 for surgical specimens alone when the cutoff value was set to 2.3660. In addition, as shown in FIG. 4 (D), when the cutoff value was set to 6.0307, sensitivity was 0.9333 and specificity was 0.9746 for surgical specimens and biopsy specimens. Further, as shown in FIG. 4 (F), when the cutoff value was set to 9.6492, sensitivity was 0.9000 and specificity was 0.9123 for surgical specimens and FFPE tissue specimens.

[0284] Subsequently, surgical specimens alone (FIG. 4 (G)), surgical specimens and biopsy specimens (FIG. 4 (H)), and surgical specimens and FFPE tissue specimens (FIG. 4 (I)) were re-aligned in the ascending order of the expression scores of 8 genes using the expression scores of 8 genes for the above-described 8 kinds of genes for differentiating BSCE. As a result, it was revealed that the BSCE specimen group and the non-BSCE specimen group can be differentiated by setting a certain cutoff value regardless of specimens.

[0285] Further, a group scatter diagram was created from all analyzed specimens using the expression scores of 8 genes for the above-described 8 kinds of genes for differentiating BSCE. As a result, as shown in FIG. 4 (J), the average value of the non-BSCE specimen group was 2.050, and the average value of the BSCE specimen group was 14.273. There was a statistically significant difference (P=1.23×10⁻¹⁰) between both groups.

[0286] Next, FIG. 4 (K) shows the results of creating a group scatter diagram separately for each specimen type. For surgical specimens, the average value of the non-BSCE specimen group was −0.623, and the average value of the BSCE specimen group was 18.805. There was a statistically significant difference (P=0.0008) between both groups. For biopsy specimens, the average value of the non-BSCE specimen group was 2.294, and the average value of the BSCE specimen group was 12.767. There was a statistically significant difference (P=0.0049) between both groups. For FFPE tissue specimens, the average value of the non-BSCE specimen group was 10.538, and the average value of the BSCE specimen group was 12.758. There was a statistically significant difference (P=0.0690) between both groups.

[0287] The above results indicated that BSCE markers consisting of the group of 8 kinds of genes for differentiating BSCE shown in NOs: R-1 to R-8 in Table 1 can also differentiate the BSCE specimen group and the non-BSCE specimen group.

### Example 7

### (Object)

[0288] A group of genes for differentiating BSCE is narrowed down from BSCE markers. [2]

### (Method and Results)

[0289] Priority ranking was made using the 70 kinds of genes for differentiating BSCE identified in Example 1 in consideration of the difference in the average value between the BSCE specimen group and the non-BSCE specimen group, standard deviation, P value of t-test, score values for the BSCE specimen group and clusters created by cluster analysis. As a result, it was revealed that even a group of 10 kinds of genes for differentiating BSCE, including 5 kinds of selected genes for differentiating BSCE represented by NOs: R-9 to R-13 in Table 1 in addition to the group of essential genes for differentiating BSCE, can differentiate the BSCE specimen group and the non-BSCE specimen group.

[0290] The basic procedures were conducted as in Example 5. An ROC curve was created from the sum obtained by extracting gene expression data of the 10 kinds of genes for differentiating BSCE to calculate the sum (hereinafter referred to as “expression scores of 10 genes”), i.e., expression scores of 10 genes. As a result, as shown in FIG. 5 (A), AUC was 1.0000 for surgical specimens alone. In addition, as shown in FIG. 5 (C), AUC was 0.9714 for surgical specimens and biopsy specimens, and as shown in FIG. 5 (E), AUC was 0.9930 for surgical specimens and FFPE tissue specimens.

[0291] Next, a sensitivity-specificity curve was created for verification. As a result, as shown in FIG. 5 (B), both sensitivity and specificity were 1.0000 for surgical specimens alone when the cutoff value was set to 2.2155. In addition, as shown in FIG. 5 (D), when the cutoff value was set to 6.6384, sensitivity was 0.9333 and specificity was 0.9915 for surgical specimens and biopsy specimens. Further, as shown in FIG. 5 (F), when the cutoff value was set to 6.5719, sensitivity was 0.9500 and specificity was 0.9825 for surgical specimens and FFPE tissue specimens.

[0292] Subsequently, surgical specimens alone (FIG. 5 (G)), surgical specimens and biopsy specimens (FIG. 5 (H)), and surgical specimens and FFPE tissue specimens (FIG. 5 (I)) were re-aligned in the ascending order of the expression scores of 10 genes using the expression scores of 10 genes for the above-described 10 kinds of genes for differentiating BSCE. As a result, it was revealed that the BSCE specimen group and the non-BSCE specimen group can be differentiated by setting a certain cutoff value regardless of specimens.

[0293] Further, a group scatter diagram was created from all analyzed specimens using the expression scores of 10 genes for the above-described 10 kinds of genes for differentiating BSCE. As a result, as shown in FIG. 5 (J), the average value of the non-BSCE specimen group was 0.311, and the average value of the BSCE group was 13.584. There was a statistically significant difference (P=1.63×10⁻¹⁰) between both groups.

[0294] Next, FIG. 5 (K) shows the results of creating a group scatter diagram separately for each specimen type. For surgical specimens, the average value of the non-BSCE specimen group was −1.814, and the average value of the BSCE specimen group was 19.965. There was a statistically significant difference (P=9.87×10⁻⁵) between both groups. For biopsy specimens, the average value of the non-BSCE specimen group was 0.551, and the average value of the BSCE specimen group was 14.208. There was a statistically significant difference (P=2.52×10⁻³) between both groups. For FFPE tissue specimens, the average value of the non-BSCE group was 5.063, and the average value of the BSCE specimen group was 9.764. There was a statistically significant difference (P=9.27×10⁻⁴) between both groups.

[0295] The above results indicated that BSCE markers consisting of the group of 10 kinds of genes for differentiating BSCE shown in NOs: R-1 to R-5 and NOs: R-9 to R-13 in Table 1 can also differentiate the BSCE specimen group and the non-BSCE specimen group.

### Example 8

### (Object)

[0296] A group of genes for differentiating BSCE is narrowed down from BSCE markers. [3]

### (Method and Results)

[0297] It was revealed that the group of 13 kinds of genes for differentiating BSCE represented by NOs: R-1 to R-13 in Table 1 verified in Examples 5 to 7, including the group of essential genes for differentiating BSCE, also can differentiate the BSCE specimen group and the non-BSCE specimen group.

[0298] The basic procedures were conducted as in Example 5. An ROC curve was created from the sum obtained by extracting gene expression data of the 13 kinds of genes for differentiating BSCE to calculate the sum (hereinafter referred to as “expression scores of 13 genes”), i.e., expression scores of 13 genes. As a result, as shown in FIG. 6 (A), AUC was 1.0000 for surgical specimens alone. In addition, as shown in FIG. 6 (C), AUC was 0.9482 for surgical specimens and biopsy specimens, and as shown in FIG. 6 (E), AUC was 0.9877 for surgical specimens and FFPE tissue specimens.

[0299] As shown in FIG. 6 (B), also for the sensitivity-specificity curve, both sensitivity and specificity were 1.0000 for surgical specimens alone when the cutoff value was set to 2.7974. In addition, as shown in FIG. 6 (D), when the cutoff value was set to 8.5372, sensitivity was 0.9333 and specificity was 0.9915 for surgical specimens and biopsy specimens. Further, as shown in FIG. 6 (F), when the cutoff value was set to 9.3096, sensitivity was 0.9500 and specificity was 0.9649 for surgical specimens and FFPE tissue specimens.

[0300] Subsequently, surgical specimens alone (FIG. 6 (G)), surgical specimens and biopsy specimens (FIG. 6 (H)), and surgical specimens and FFPE tissue specimens (FIG. 6 (I)) were re-aligned in the ascending order of the expression scores of 13 genes using the expression scores of 13 genes for the above-described 13 kinds of genes for differentiating BSCE. As a result, it was revealed that the BSCE specimen group and the non-BSCE specimen group can be differentiated by setting a certain cutoff value regardless of specimens.

[0301] Further, a group scatter diagram was created from all analyzed specimens using the expression scores of 13 genes for the above-described 13 kinds of genes for differentiating BSCE. As a result, as shown in FIG. 6 (J), the average value of the non-BSCE specimen group was 1.309, and the average value of the BSCE group was 17.360. There was a statistically significant difference (P=3.94×10⁻¹⁰) between both groups.

[0302] Next, FIG. 6 (K) shows the results of creating a group scatter diagram separately for each specimen type. For surgical specimens, the average value of the non-BSCE specimen group was −1.471, and the average value of the BSCE specimen group was 25.570. There was a statistically significant difference (P=0.0003) between both groups. For biopsy specimens, the average value of the non-BSCE specimen group was 1.605, and the average value of the BSCE specimen group was 17.174. There was a statistically significant difference (P=0.0029) between both groups. For FFPE tissue specimens, the average value of the non-BSCE specimen group was 8.281, and the average value of the BSCE specimen group was 13.055. There was a statistically significant difference (P=0.0035) between both groups.

[0303] The above results indicated that BSCE markers consisting of the group of 13 kinds of genes for differentiating BSCE shown in NOs: R-1 to R-13 in Table 1 can also differentiate the BSCE specimen group and the non-BSCE specimen group.

### Example 9

### (Object)

[0304] A group of genes for differentiating BSCE is narrowed down from BSCE markers. [4]

### (Method and Results)

[0305] Priority ranking was made using the 70 kinds of genes for differentiating BSCE identified in Example 1 in consideration of the difference in the average value between the BSCE specimen group and the non-BSCE specimen group, standard deviation, P value of t-test, score values for the BSCE specimen group and clusters created by cluster analysis. As a result, it was revealed that even a group of 7 kinds of genes for differentiating BSCE, including 2 kinds of selected genes for differentiating BSCE represented by NOs: R-14 and R-15 in Table 1 in addition to the group of essential genes for differentiating BSCE, can differentiate the BSCE specimen group and the non-BSCE specimen group.

[0306] The basic procedures were conducted as in Example 5. An ROC curve was created from the sum obtained by extracting gene expression data of the 7 kinds of genes for differentiating BSCE to calculate the sum (hereinafter referred to as “expression scores of 7 genes”), i.e., values of expression scores of 7 genes. As a result, as shown in FIG. 7 (A), AUC was 1.0000 for surgical specimens alone. In addition, as shown in FIG. 7 (C), AUC was 0.9648 for surgical specimens and biopsy specimens, and as shown in FIG. 7 (E), AUC was 0.9904 for surgical specimens and FFPE tissue specimens.

[0307] Next, a sensitivity-specificity curve was created for verification. As a result, as shown in FIG. 7 (B), both sensitivity and specificity were 1.0000 for surgical specimens alone when the cutoff value was set to 1.1138. In addition, as shown in FIG. 7 (D), when the cutoff value was set to 4.2419, sensitivity was 0.9333 and specificity was 0.9746 for surgical specimens and biopsy specimens. Further, as shown in FIG. 7 (F), when the cutoff value was set to 8.2572, sensitivity was 0.9000 and specificity was 1.0000 for surgical specimens and FFPE tissue specimens.

[0308] Subsequently, surgical specimens alone (FIG. 7 (G)), surgical specimens and biopsy specimens (FIG. 7 (H)), and surgical specimens and FFPE tissue specimens (FIG. 7 (I)) were re-aligned in the ascending order of the expression scores of 7 genes using the expression scores of 7 genes for the above-described 7 kinds of genes for differentiating BSCE. As a result, it was revealed that the BSCE specimen group and the non-BSCE specimen group can be differentiated by setting a certain cutoff value regardless of specimens.

[0309] Further, a group scatter diagram was created from all analyzed specimens using the expression scores of 7 genes for the above-described 7 kinds of genes for differentiating BSCE. As a result, as shown in FIG. 7 (J), the average value of the non-BSCE specimen group was 0.256, and the average value of the BSCE specimen group was 12.531. There was a statistically significant difference (P=1.28×10⁻¹¹) between both groups.

[0310] Next, FIG. 7 (K) shows the results of creating a group scatter diagram separately for each specimen type. For surgical specimens, the average value of the non-BSCE specimen group was −2.845, and the average value of the BSCE specimen group was 15.358. There was a statistically significant difference (P=0.0003) between both groups. For biopsy specimens, the average value of the non-BSCE specimen group was 0.617, and the average value of the BSCE specimen group was 12.544. There was a statistically significant difference (P=0.0037) between both groups. For FFPE tissue specimens, the average value of the non-BSCE group was 6.748, and the average value of the BSCE specimen group was 11.001. There was a statistically significant difference (P=0.0010) between both groups.

[0311] The above results indicated that BSCE markers consisting of the group of 7 kinds of genes for differentiating BSCE shown in NOs: R-1 to R-5 and NOs: R-14 and R-15 in Table 1 can also differentiate the BSCE specimen group and the non-BSCE specimen group.

### Example 10

### (Object)

[0312] A group of genes for differentiating BSCE is narrowed down from BSCE markers. [5]

### (Method and Results)

[0313] Priority ranking was made using the 70 kinds of genes for differentiating BSCE identified in Example 1 in consideration of the difference in the average value between the BSCE specimen group and the non-BSCE specimen group, standard deviation, P value of t-test, score values for the BSCE specimen group and clusters created by cluster analysis. It was revealed that even a group of 10 kinds of genes for differentiating BSCE, further including 2 kinds of selected genes for differentiating BSCE represented by NOs: R-14 and R-15 in Table 1, in addition to the group of 8 kinds of genes for differentiating BSCE represented by NOs: R-1 to R-8 in Table 1 described in Example 6, can differentiate the BSCE specimen group and the non-BSCE specimen group.

[0314] The basic procedures were conducted as in Example 5. An ROC curve was created from the sum obtained by extracting gene expression data of the 10 kinds of genes for differentiating BSCE to calculate the sum (hereinafter referred to as “expression scores of 10′ genes”), i.e., values of expression scores of 10′ genes. As a result, as shown in FIG. 8 (A), AUC was 1.0000 for surgical specimens alone. In addition, as shown in FIG. 8 (C), AUC was 0.9437 for surgical specimens and biopsy specimens, and as shown in FIG. 8 (E), AUC was 0.9851 for surgical specimens and FFPE tissue specimens.

[0315] Next, a sensitivity-specificity curve was created for verification. As a result, as shown in FIG. 8 (B), both sensitivity and specificity were 1.0000 for surgical specimens alone when the cutoff value was set to 0.7590. In addition, as shown in FIG. 8 (D), when the cutoff value was set to 6.1962, sensitivity was 0.9333 and specificity was 0.9774 for surgical specimens and biopsy specimens. Further, as shown in FIG. 8 (F), when the cutoff value was set to 10.2696, sensitivity was 0.9000 and specificity was 0.9474 for surgical specimens and FFPE tissue specimens.

[0316] Subsequently, surgical specimens alone (FIG. 8 (G)), surgical specimens and biopsy specimens (FIG. 8 (H)), and surgical specimens and FFPE tissue specimens (FIG. 8 (I)) were re-aligned in the ascending order of the expression scores of 10′ genes using the expression scores of 10′ genes for the above-described 10 kinds of genes for differentiating BSCE. As a result, it was revealed that the BSCE specimen group and the non-BSCE specimen group can be differentiated by setting a certain cutoff value regardless of specimens.

[0317] Further, a group scatter diagram was created from all analyzed specimens using the expression scores of 10′ genes for the above-described 10 kinds of genes for differentiating BSCE. As a result, as shown in FIG. 8 (J), the average value of the non-BSCE specimen group was 1.254, and the average value of the BSCE specimen group was 16.308. There was a statistically significant difference (P=6.69×10⁻¹¹) between both groups.

[0318] Next, FIG. 8 (K) shows the results of creating a group scatter diagram separately for each specimen type. For surgical specimens, the average value of the non-BSCE specimen group was −2.502, and the average value of the BSCE specimen group was 20.963. There was a statistically significant difference (P=0.0007) between both groups. For biopsy specimens, the average value of the non-BSCE specimen group was 1.671, and the average value of the BSCE specimen group was 15.510. There was a statistically significant difference (P=0.0040) between both groups. For FFPE tissue specimens, the average value of the non-BSCE group was 9.966, and the average value of the BSCE specimen group was 14.292. There was a statistically significant difference (P=0.0039) between both groups.

[0319] The above results indicated that BSCE markers consisting of the group of 10 kinds of genes for differentiating BSCE shown in NOs: R-1 to R-8 and NOs: R-14 and R-15 in Table 1 can also differentiate the BSCE specimen group and the non-BSCE specimen group.

### Example 11

### (Object)

[0320] A group of genes for differentiating BSCE is narrowed down from BSCE markers. [6]

### (Method and Results)

[0321] Priority ranking was made using the 70 kinds of genes for differentiating BSCE identified in Example 1 in consideration of the difference in the average value between the BSCE specimen group and the non-BSCE specimen group, standard deviation, P value of t-test, score values for the BSCE specimen group and clusters created by cluster analysis. It was revealed that even a group of 12 kinds of genes for differentiating BSCE, further including 2 kinds of selected genes for differentiating BSCE represented by NOs: R-14 and R-15 in Table 1 in addition to the group of 10 kinds of genes for differentiating BSCE represented by NOs: R-1 to R-5 and NOs: R-9 to R-13 in Table 1 described in Example 7, can differentiate the BSCE specimen group and the non-BSCE specimen group.

[0322] The basic procedures were conducted as in Example 5. An ROC curve was created from the sum obtained by extracting gene expression data of the 12 kinds of genes for differentiating BSCE to calculate the sum (hereinafter referred to as “expression scores of 12 genes”), i.e., values of expression scores of 12 genes. As a result, as shown in FIG. 9 (A), AUC was 1.0000 for surgical specimens alone. In addition, as shown in FIG. 9 (C), AUC was 0.9772 for surgical specimens and biopsy specimens, and as shown in FIG. 9 (E), AUC was 0.9974 for surgical specimens and FFPE tissue specimens.

[0323] Next, a sensitivity-specificity curve was created for verification. As a result, as shown in FIG. 9 (B), both sensitivity and specificity were 1.0000 for surgical specimens alone when the cutoff value was set to 1.4000. In addition, as shown in FIG. 9 (D), when the cutoff value was set to 6.6782, sensitivity was 0.9333 and specificity was 0.9915 for surgical specimens and biopsy specimens. Further, as shown in FIG. 9 (F), when the cutoff value was set to 6.7474, sensitivity was 0.9500 and specificity was 1.0000 for surgical specimens and FFPE tissue specimens.

[0324] Subsequently, surgical specimens alone (FIG. 9 (G)), surgical specimens and biopsy specimens (FIG. 9 (H)), and surgical specimens and FFPE tissue specimens (FIG. 9 (I)) were re-aligned in the ascending order of the expression scores of 12 genes using the expression scores of 12 genes for the above-described 12 kinds of genes for differentiating BSCE. As a result, it was revealed that the BSCE specimen group and the non-BSCE specimen group can be differentiated by setting a certain cutoff value regardless of specimens.

[0325] Further, a group scatter diagram was created from all analyzed specimens using the expression scores of 12 genes for the above-described 12 kinds of genes for differentiating BSCE. As a result, as shown in FIG. 9 (J), the average value of the non-BSCE specimen group was −0.485, and the average value of the BSCE specimen group was 15.619. There was a statistically significant difference (P=9.03×10⁻¹¹) between both groups.

[0326] Next, FIG. 9 (K) shows the results of creating a group scatter diagram separately for each specimen type. For surgical specimens, the average value of the non-BSCE specimen group was −3.692, and the average value of the BSCE specimen group was 22.123. There was a statistically significant difference (P=0.0001) between both groups. For biopsy specimens, the average value of the non-BSCE specimen group was −0.072, and the average value of the BSCE specimen group was 16.950. There was a statistically significant difference (P=0.0024) between both groups. For FFPE tissue specimens, the average value of the non-BSCE group was 4.490, and the average value of the BSCE specimen group was 11.297. There was a statistically significant difference (P=0.0001) between both groups.

[0327] The above results indicated that BSCE markers consisting of the group of 12 kinds of genes for differentiating BSCE shown in NOs: R-1 to R-5, NOs: R-9 to R-13, and NOs: R-14 and R-15 in Table 1 can also differentiate the BSCE specimen group and the non-BSCE specimen group.

### Example 12

### (Object)

[0328] A group of genes for differentiating BSCE is narrowed down from BSCE markers. [7]

### (Method and Results)

[0329] Priority ranking was made using the 70 kinds of genes for differentiating BSCE identified in Example 1 in consideration of the difference in the average value between the BSCE specimen group and the non-BSCE specimen group, standard deviation, P value of t-test, score values for the BSCE specimen group and clusters created by cluster analysis. It was revealed that even a group of 15 kinds of genes for differentiating BSCE, further including 2 kinds of selected genes for differentiating BSCE represented by NOs: R-14 and R-15 in Table 1 in addition to the group of 13 kinds of genes for differentiating BSCE represented by NOs: R-1 to R-13 in Table 1 described in Example 7, can differentiate the BSCE specimen group and the non-BSCE specimen group.

[0330] The basic procedures were conducted as in Example 5. An ROC curve was created from the sum obtained by extracting gene expression data of the 15 kinds of genes for differentiating BSCE to calculate the sum (hereinafter referred to as “expression scores of 15 genes”), i.e., expression scores of 15 genes. As a result, as shown in FIG. 10 (A), AUC was 1.0000 for surgical specimens alone. In addition, as shown in FIG. 10 (C), AUC was 0.9556 for surgical specimens and biopsy specimens, and as shown in FIG. 10 (E), AUC was 0.9939 for surgical specimens and FFPE tissue specimens.

[0331] Next, a sensitivity-specificity curve was created for verification. As a result, as shown in FIG. 10 (B), both sensitivity and specificity were 1.0000 for surgical specimens alone when the cutoff value was set to 1.0559. In addition, as shown in FIG. 10 (D), when the cutoff value was set to 8.8317, sensitivity was 0.9333 and specificity was 0.9915 for surgical specimens and biopsy specimens. Further, as shown in FIG. 10 (F), when the cutoff value was set to 9.2942, sensitivity was 0.9500 and specificity was 0.9825 for surgical specimens and FFPE tissue specimens.

[0332] Subsequently, surgical specimens alone (FIG. 10 (G)), surgical specimens and biopsy specimens (FIG. 10 (H)), and surgical specimens and FFPE tissue specimens (FIG. 10 (I)) were re-aligned in the ascending order of the expression scores of 15 genes using the expression scores of 15 genes for the above-described 15 kinds of genes for differentiating BSCE. As a result, it was revealed that the BSCE specimen group and the non-BSCE specimen group can be differentiated by setting a certain cutoff value regardless of specimens.

[0333] Further, a group scatter diagram was created from all analyzed specimens using the expression scores of 15 genes for the above-described 15 kinds of genes for differentiating BSCE. As a result, as shown in FIG. 10 (J), the average value of the non-BSCE specimen group was 0.513, and the average value of the BSCE specimen group was 19.396. There was a statistically significant difference (P=2.11×10⁻¹⁰) between both groups.

[0334] Next, FIG. 10 (K) shows the results of creating a group scatter diagram separately for each specimen type. For surgical specimens, the average value of the non-BSCE specimen group was −3.349, and the average value of the BSCE specimen group was 27.728. There was a statistically significant difference (P=0.0003) between both groups. For biopsy specimens, the average value of the non-BSCE specimen group was 0.982, and the average value of the BSCE specimen group was 19.917. There was a statistically significant difference (P==0.0028) between both groups. For FFPE tissue specimens, the average value of the non-BSCE group was 7.708, and the average value of the BSCE specimen group was 14.588. There was a statistically significant difference (P==0.0003) between both groups.

[0335] The above results indicated that BSCE markers consisting of the group of 15 kinds of genes for differentiating BSCE shown in NOs: R-1 to R-13 and NOs: R-14 to R-15 in Table 1 can also differentiate the BSCE specimen group and the non-BSCE specimen group.

[0336] All publications, patents, and patent applications cited herein are incorporated herein by reference in their entirety.

1. A method for assisting differentiating contraction of basaloid squamous cell carcinoma of the esophagus, comprising:
a measurement step of measuring expression levels of 5 kinds of genes comprising nucleotide sequences shown in SEQ ID NOs: 141 to 145, respectively, per unit amount of samples collected from a test subject and a healthy subject or a group of healthy subjects, thereby obtaining measurement values thereof;
a calculation step of, based on the measurement values obtained in the measurement step, calculating expression ratios for each gene based on the measurement values of the test subject and the healthy subject or the group of healthy subjects, thereby obtaining a sum of the expression ratios, or calculating an average measurement value from the respective measurement values of all of the genes measured in the measurement step for the test subject and the group of healthy subjects; and
a determination step of, based on the values obtained in the calculation step, determining that the test subject is highly likely to be affected with basaloid squamous cell carcinoma of the esophagus in a case in which the sum exceed a given cutoff value resulting from an ROC curve, or in a case in which the average measurement value of the test subject is statistically significantly larger than the average measurement value of the group of healthy subjects.

2. The method according to claim 1, wherein the genes comprising the nucleotide sequences shown in SEQ ID NOs: 141 to 145 encode the proteins consisting of the amino acid sequences shown in SEQ ID NOs: 71 to 75, respectively.

3. The method according to claim 2, wherein the genes encoding the proteins consisting of the amino acid sequences shown in SEQ ID NOs: 71 to 75 consist of the nucleotide sequences shown in SEQ ID NOs: 1 to 5, respectively.

4. The method according to claim 1, wherein the measurement step further comprises measuring the expression level per unit amount for one or more genes comprising the nucleotide sequences shown in SEQ ID NOs: 146 to 148, respectively.

5. The method according to claim 4, wherein the genes comprising the nucleotide sequences shown in SEQ ID NOs: 146 to 148 encode the proteins consisting of the amino acid sequences shown in SEQ ID NOs: 76 to 78, respectively.

6. The method according to claim 5, wherein the genes encoding the proteins consisting of the amino acid sequences shown in SEQ ID NOs: 76 to 78 consist of the nucleotide sequences shown in SEQ ID NOs: 6 to 8, respectively.

7. The method according to claim 1, wherein the measurement step further comprises measuring the expression level per unit amount for one or more genes comprising the nucleotide sequences shown in SEQ ID NOs: 149 to 153, respectively.

8. The method according to claim 7, wherein the genes comprising the nucleotide sequences shown in SEQ ID NOs: 149 to 153 encode the proteins consisting of the amino acid sequences shown in SEQ ID NOs: 79 to 83, respectively.

9. The method according to claim 8, wherein the genes encoding the proteins consisting of the amino acid sequences shown in SEQ ID NOs: 79 to 83 consist of the nucleotide sequences shown in SEQ ID NOs: 9 to 13, respectively.

10. The method according to claim 1, wherein the measurement step further comprises measuring the expression level per unit amount for one or more genes comprising the nucleotide sequences shown in SEQ ID NOs: 154 to 210, respectively.

11. The method according to claim 10, wherein the genes comprising the nucleotide sequences shown in SEQ ID NOs: 154 to 210 encode the proteins consisting of the amino acid sequences shown in SEQ ID NOs: 84 to 140, respectively.

12. The method according to claim 11, wherein the genes encoding the proteins consisting of the amino acid sequences shown in SEQ ID NOs: 84 to 140 consist of the nucleotide sequences shown in SEQ ID NOs: 14 to 70, respectively.

13. The method according to claim 1, wherein the expression level of the gene per unit amount is measured as an absolute amount or a relative amount of mRNA of the gene or a nucleotide fragment thereof or a protein encoded by the gene or a peptide fragment thereof per unit amount.

14. The method according to claim 1, wherein in the determination step the average measurement value of the test subject is twice or more than the average measurement value of the group of healthy subjects.

15. A marker for basaloid squamous cell carcinoma of the esophagus, wherein said marker consists of a group of 5 kinds of genes comprising the nucleotide sequences shown in SEQ ID NOs: 141 to 145, respectively.

16. The marker for basaloid squamous cell carcinoma of the esophagus according to claim 15, wherein the 5 kinds of genes encode the proteins consisting of the amino acid sequences shown in SEQ ID NOs: 71 to 75, respectively.

17. The marker for basaloid squamous cell carcinoma of the esophagus according to claim 16, wherein the genes encoding the proteins consisting of the amino acid sequences shown in SEQ ID NOs: 71 to 75 consist of the nucleotide sequences shown in SEQ ID NOs: 1 to 5, respectively.

18. The marker for basaloid squamous cell carcinoma of the esophagus according to claim 15, wherein said marker consists of the group of genes further comprising one or more genes comprising the nucleotide sequences shown in SEQ ID NOs: 146 to 148, respectively.

19. The marker for basaloid squamous cell carcinoma of the esophagus according to claim 18, wherein the genes comprising the nucleotide sequences shown in SEQ ID NOs: 146 to 148 encode the proteins consisting of the amino acid sequences shown in SEQ ID NOs: 76 to 78, respectively.

20. The marker for basaloid squamous cell carcinoma of the esophagus according to claim 19, wherein the genes encoding the proteins consisting of the amino acid sequences shown in SEQ ID NOs: 76 to 78 consist of the nucleotide sequences shown in SEQ ID NOs: 6 to 8, respectively.

21. The marker for basaloid squamous cell carcinoma of the esophagus according to claim 15, wherein said marker consists of the group of genes further comprising one or more genes comprising the nucleotide sequences shown in SEQ ID NOs: 149 to 153, respectively.

22. The marker for basaloid squamous cell carcinoma of the esophagus according to claim 21, wherein the genes comprising the nucleotide sequences shown in SEQ ID NOs: 149 to 153 encode the proteins consisting of the amino acid sequences shown in SEQ ID NOs: 79 to 83, respectively.

23. The marker for basaloid squamous cell carcinoma of the esophagus according to claim 22, wherein the genes encoding the proteins consisting of the amino acid sequences shown in SEQ ID NOs: 79 to 83 consist of the nucleotide sequences shown in SEQ ID NOs: 9 to 13, respectively.

24. The marker for basaloid squamous cell carcinoma of the esophagus according to claim 15, wherein said marker consists of the group of genes further comprising one or more genes comprising the nucleotide sequences shown in SEQ ID NOs: 154 to 210, respectively.

25. The marker for basaloid squamous cell carcinoma of the esophagus according to claim 24, wherein the genes comprising the nucleotide sequences shown in SEQ ID NOs: 154 to 210 encode the proteins consisting of the amino acid sequences shown in SEQ ID NOs: 84 to 140, respectively.

26. The marker for basaloid squamous cell carcinoma of the esophagus according to claim 25, wherein the genes encoding the proteins consisting of the amino acid sequences shown in SEQ ID NOs: 84 to 140 consist of the nucleotide sequences shown in SEQ ID NOs: 14 to 70, respectively.

27. A reagent for detecting basaloid squamous cell carcinoma of the esophagus, wherein said reagent contains a group of probes consisting of nucleotide sequences shown in SEQ ID NOs: 141 to 145.

28. The reagent for detecting basaloid squamous cell carcinoma of the esophagus according to claim 27, wherein said reagent further contains one or more probes consisting of nucleotide sequences shown in SEQ ID NOs: 146 to 148.

29. The reagent for detecting basaloid squamous cell carcinoma of the esophagus according to claim 27, wherein said reagent further contains one or more probes consisting of nucleotide sequences shown in SEQ ID NOs: 149 to 153.

30. The reagent for detecting basaloid squamous cell carcinoma of the esophagus according to claim 27, wherein said reagent further contains one or more probes consisting of nucleotide sequences shown in SEQ ID NOs: 154 to 210.

31. A kit for detecting basaloid squamous cell carcinoma of the esophagus, wherein said kit contains the reagent for detecting basaloid squamous cell carcinoma of the esophagus according to claim 27.

The application's sequence listing, which the Patent Office published only in electronic form, follows.

SEQUENCE LISTING (210 sequences)

SEQ ID NO: 1 - DNA, 2070 bp, Homo sapiens
atggccgccgctacggcctccccccgcagcctccttgttctcctccaggtggtagtgctcgctctggcgcagattagaggtccaccgggagagcggggccccccgggtcccccgggaccgccgggagtgcctggatccgacggcatcgacggtgacaatgggccccctggaaaagctggccctccgggacccaagggcgagcctggcaaagctgggccagatgggccagacgggaagcccgggattgatggtttaactggagccaagggggagcctggccccatggggatccctggagtcaagggccagcccgggcttcctggtcctcctggccttccgggccctggttttgctggacctcctgggcctcctggacctgttggcctccctggtgagattggaatccgaggccccaagggggaccctggaccagatggaccatcggggcccccaggaccccctgggaaacctggtcgcccgggaaccatccagggtctggaaggcagtgcggatttcctgtgtccaaccaactgtccacccggaatgaaaggtcccccagggctgcagggagtgaaggggcatgcgggcaaacgcgggattctgggtgatcctggccaccaggggaagccgggtcccaagggagatgtgggtgcctctggagagcaaggcatccctggaccaccgggtccccagggcatcaggggctacccaggcatggcagggcccaagggagagacgggccctcatggatataaaggcatggtgggcgctatcggtgccactgggccaccgggtgaggaaggtcctaggggaccgccaggccgagctggggagaagggtgacgagggcagcccaggtattcgtggaccccaggggatcacaggcccgaaaggagcaacgggccccccaggcatcaacggcaaggatgggaccccaggcacgcctggcatgaagggcagtgcaggacaggcgggacagcccggaagtccaggccaccagggcctagcgggtgtgccaggccagcctgggacaaaaggaggccctggagaccagggtgagccgggcccgcagggccttcctggattctctggtccccctgggaaagagggagagccagggcctcgaggagaaattggtccccagggcatcatgggacagaagggtgaccaaggcgagaggggtccagtggggcaaccaggccctcagggaaggcagggccctaagggggagcagggcccccccggaattccagggccccaaggcttgccaggcgtcaaaggagacaagggctccccagggaagaccgggccccgcggcaaagtgggtgacccaggggtggccggcctccccggagagaaaggcgagaagggcgagtccggcgagccggggcccaagggacagcaaggagtacgtggagaacccggctaccctggccccagcggggatgcgggcgccccaggggttcagggctaccctggtccccccggccctcgaggactggccgggaaccgaggcgtgccaggacagcccgggagacagggcgtggagggccgggatgccactgaccagcacatcgtggatgtggcgctgaagatgctgcaagagcaactggcagaggtcgccgtgagtgccaagcgggaagccctgggtgcggtgggcatgatgggtcctccaggacctcctgggccccctgggtacccaggcaagcagggcccccatgggcaccctggccctcggggcgttcctggcatcgtgggagccgtgggtcagatcggcaacacggggcccaagggaaaacgtggagagaagggtgatccaggagaagtgggacgggggcaccccgggatgcctgggcccccagggatcccaggactccctggccggcctggccaggcaatcaacggcaaggatggagatcgagggtccccaggggctccaggagaggcaggtcgacctggcctgccaggccccgtggggctgccgggcttctgtgaacctgccgcctgccttggagcttcggcctatgcctctgcccgccttacagagcctggatccatcaaggggccttga

SEQ ID NO: 2 - DNA, 720 bp, Homo sapiens
atgggcctaatctggctgctactgctcagcctgctggagcccggctggcccgcagcgggccctggggcgcggttgcggcgcgatgcgggcggccgtggcggcgtctacgagcaccttggcggggcgccccggcgccgcaagctctactgcgccacgaagtaccacctccagctgcacccgagcggccgcgtcaacggcagcctggagaacagcgcctacagtattttggagataacggcagtggaggtgggcattgtggccatcaggggtctcttctccgggcggtacctggccatgaacaagaggggacgactctatgcttcggagcactacagcgccgagtgcgagtttgtggagcggatccacgagctgggctataatacgtatgcctcccggctgtaccggacggtgtctagtacgcctggggcccgccggcagcccagcgccgagagactgtggtacgtgtctgtgaacggcaagggccggccccgcaggggcttcaagacccgccgcacacagaagtcctccctgttcctgccccgcgtgctggaccacagggaccacgagatggtgcggcagctacagagtgggctgcccagaccccctggtaagggggtccagccccgacggcggcggcagaagcagagcccggataacctggagccctctcacgttcaggcttcgagactgggctcccagctggaggccagtgcgcactag

SEQ ID NO: 3 - DNA, 1296 bp, Homo sapiens
atgctggcgctgctggccgccagcgtggcgctcgccgtggccgctggggcccaggacagcccggcgcccggtagccgcttcgtgtgcacggcactgcccccagaggcggtgcacgccggctgcccgctgcccgcgatgcccatgcagggcggcgcgcagagtcccgaggaggagctgagggccgcggtgctgcagctgcgcgagaccgtcgtgcagcagaaggagacgctgggcgcgcagcgcgaggccatccgcgagctcacgggcaagctagcgcgctgcgaggggctggcgggcggcaaggcgcgcggcgcgggggccacgggcaaggacactatgggcgacctgccgcgggaccccggccacgtcgtggagcagctcagccgctcgctgcagaccctcaaggaccgcctggagagcctcgagcaccagctcagagcaaacgtgtccaatgctgggctgcccggcgacttccgcgaggtgctccagcagcggctgggggagctggagaggcagcttctgcgcaaggtggcagagctggaggacgagaagtccctgctgcacaatgagacctcggctcaccggcagaagaccgagagcaccctgaacgcgctgctgcagagggtcaccgagctggagcgaggcaatagcgcctttaagtcaccagatgcgttcaaggtgtccctcccactccgcacaaactacctatacggcaagatcaagaagacgctgcctgagctgtacgccttcaccatctgcctgtggctgcggtccagcgcctcaccaggcattggcacccccttctcctatgcggtgccagggcaggccaacgagatcgtgctgatcgagtggggcaacaaccccatcgagctgctcatcaacgacaaggttgcgcagctgcccctgtttgtcagtgacggcaagtggcaccacatctgtgtcacctggacgacacgggatggcatgtgggaggcattccaggacggagagaagctgggcactggggagaacctggccccctggcaccccatcaagcccgggggcgtgctgatccttggacaagagcaggacaccgtggggggtaggtttgatgccactcaggcatttgtcggggagctcagccagttcaacatatgggaccgcgtccttcgcgcacaagaaattgtcaacatcgccaactgctccacaaacatgccgggcaacatcatcccgtgggtggacaataacgtcgatgtgttcggaggggcctccaagtggcccgtggagacgtgtgaggagcgtctccttgacttgtag

SEQ ID NO: 4 - DNA, 2055 bp, Homo sapiens
atggccgggccgcgcgcgtgcgccccgctcctgctcctgctcctgctcggggagcttctggcggccgccggggcgcagagagtgggactccccggcccccccggccccccagggccgcccgggaagcccggccaggacggcattgacggagaagctggtcctccaggtctgcctgggcccccgggaccaaagggggccccaggaaagccggggaaaccaggagaggctgggctgccgggactgccgggtgtggatggtctgactggacgagatggaccccctggacccaagggtgcccctggggaacggggaagtctgggacccccggggccgcccgggctggggggcaaaggcctccctggaccccccggagaggcaggagtgagcggccccccaggtgggatcggcctccgcggccccccgggaccttctggactccccggcctccctggtcccccaggacctcccggaccccctggacacccaggagtcctccctgaaggcgctactgaccttcagtgcccaagtatctgcccgccaggtcccccagggccccctggaatgccagggttcaagggacccactggctacaaaggcgagcagggggaagtcggcaaggacggcgagaagggtgaccctggcccccctgggcccgccggcctcccgggcagcgtggggctgcagggcccccggggattacgaggactgccagggccactcgggccccctggggaccggggtcccattgggttccgagggccgcctgggatcccaggagcgcctgggaaagcgggtgaccgaggcgagaggggcccagaagggttccgcggccccaagggtgacctcggcagacctggtcccaagggaacccccggagtggccgggccaagcggagagccgggcatgccgggcaaggacggccagaatggcgtgccaggactcgatggccagaagggagaggctggtcgcaacggtgctccgggagagaagggccccaacgggctgccgggcctccctggacgagcggggtccaaaggcgagaagggagaacggggcagagctggggagctgggtgaggccggcccctctggagagccaggcgtccctggagatgctggcatgcctggggagcgcggtgaggctggccaccggggctcagcgggggccctcggcccacaaggccctcccggagcccctggtgtccgaggcttccagggccagaagggcagcatgggagaccccggccttccaggcccccagggcctccgaggtgacgtgggcgaccggggtccgggaggtgccgcaggccctaagggagaccagggtattgcaggttccgacggtcttcctggggataaaggagaactgggtcccagcggcctggtcggacccaaaggagagtctggcagtcgaggggagctgggccccaaaggcacccagggtcccaacggcaccagcggtgttcagggtgtccccgggccccccggtcctctgggcctgcagggcgtcccgggtgttcctggcatcacggggaagccgggagttccggggaaggaggccagcgagcagcgcatcagggagctgtgtggggggatgatcagcgaacaaattgcacagttagccgcgcacctaaggaagcctttggcacccgggtccattggtcggcccggtccagctggcccccctgggcccccaggacccccaggctccattggtcaccctggcgctcgaggaccccctggataccgcggtcccactggggagctgggagaccccgggcccagaggaaaccagggtgacagaggagacaaaggcgcggcaggagcagggctggacgggcctgaaggagaccaggggccccaaggaccccaaggcgtgcccggcaccagcaaggacggccaggacggtgctcccggcgagcctgggcctcccggagatcctgggcttccaggtgccattggggcccaggggacaccggggatctgcgacacctcagcctgccaaggagccgtgttaggaggggtcggggagaaatcaggctctcgaagctcataa

SEQ ID NO: 5 - DNA, 2766 bp, Homo sapiens
atgaagacctgctggaaaattccagttttcttctttgtgtgcagtttcctggaaccctgggcatctgcagctgtcaagcgtcgccccagattccctgtcaattccaattctaatggtggaaatgaactctgtccaaagatcaggattggccaagatgacttaccagggtttgatctgatctctcagttccaggtagataaagcagcatctagaagagctatccagagagtagtgggatcagctacattgcaggtggcttacaagttgggaaataatgtagacttcaggattccaactaggaatttatatcccagtggactgcctgaagaatactccttcttgacgacgtttcgaatgactggaagcactctcaaaaagaactggaacatttggcagattcaggattcctctgggaaggagcaagttggcataaagattaatggccaaacacaatctgttgtattttcatacaagggactggatggaagtctccaaacagcagccttttcgaatttgtcctccttgtttgattcccagtggcataagatcatgattggcgtggagaggagtagtgctactctttttgttgactgcaacaggattgaatctttacctataaagccaagaggcccaattgacattgatggctttgctgtgctgggaaaacttgcagataatcctcaagtttctgttccatttgaacttcaatggatgctgatccattgtgaccccctgcggcccaggagagaaacttgccatgagctgccagccagaataacgcccagccagaccaccgacgagagaggtcccccgggtgagcagggtcctcccgggcctccgggcccccctggagttccaggcatcgatggcatcgacggtgaccgaggtcctaagggccccccgggccccccgggtcctgcaggtgaaccgggaaagccaggagctccaggcaagcctggcacacctggcgctgatggattaacaggacctgatggatcccctggctccattgggtcaaagggacaaaaaggagaacctggtgtgcctggatcgcgtggatttccaggccgtggtattcctggaccccctggtcctcctgggacagcaggactccctggagagcttggccgtgtaggacctgttggtgaccctgggagaagaggaccacctggcccccctggccccccaggacccagaggaacaattggctttcatgatggagatccattgtgtcccaatgcctgtccaccaggtcgctcaggatatccaggcctaccaggcatgaggggtcataaaggggctaaaggagaaattggtgaaccaggaagacaaggacacaagggtgaagaaggtgaccagggagaactcggagaagttggagctcaaggacctccaggagcccagggtttgcgaggcatcaccggcatagttggggacaaaggggaaaaaggtgctcggggcttagatggtgaacctgggcctcagggtcttcctggtgcacctggtgatcaaggacagcgaggacctccaggagaagcaggtcccaaaggagatagaggggctgaaggtgctagaggaattcctggtctccctgggcccaaaggagacacgggtttgccaggtgtggatggccgtgatgggatccctggaatgcctggaacaaagggtgaaccaggaaaacctgggcctcctggtgatgcaggattgcaggggttaccaggtgtacctggaattcctggtgcaaagggtgttgctggtgaaaagggtagcacaggtgctccagggaagcctggtcagatgggaaattcaggcaaaccgggccaacaggggcctccaggagaggtgggaccccgaggaccccaggggcttcctggcagtagaggagaattaggaccagtgggatccccaggcctaccaggtaaactgggttctctgggtagccctggcctccctggcttgcctgggccccctggacttcctggaatgaaaggtgacaggggtgtagtcggtgaaccgggtccaaagggtgaacagggtgcctctggtgaagaaggtgaagcaggagaaaggggggaacttggagatataggattacctggcccaaagggatctgcaggtaatcctggggaacctggcttgagagggcctgagggaagtcgggggcttcctggagtggaaggaccaagaggaccacctggaccccggggtgtgcagggagaacagggtgccaccggcctgcctggtgtccagggccctccgggtagagcaccgacagatcagcacattaagcaggtttgcatgagagtcatacaagaacattttgctgagatggctgccagtcttaagcgtccagactcaggtgccactgggcttcctggaaggcctggccctcctggtccccccggccctcctggagagaatggtttcccaggccagatgggaattcgtggccttccgggcattaaggggccccctggtgctcttggtttgaggggacctaaaggtgacttgggagaaaagggggagcgtggccctccaggaagaggtcccaacggtttgcctggagctataggtctcccaggtgacccaggccctgccagctatggcagaaatggccgagacggtgagcgaggccccccaggggtggcaggaattcctggagtgcctggacccccgggacctcctgggcttcccggtttctgtgagccagcctcctgcaccatgcaggctggtcagcgagcatttaacaaagggcctgacccttga

SEQ ID NO: 6 - DNA, 615 bp, Homo sapiens
atggaccccaaggaccgcaagaagatccagttctcggtgcccgcgccccctagccagctcgacccccgccaggtggagatgatccggcgcaggagaccaacgcctgccatgctgttccggctctcagagcactcctcaccagaggaggaagcctccccccaccagagagcctcaggagaggggcaccatctcaagtcgaagagacccaacccctgtgcctacacaccaccttcgctgaaagctgtgcagcgcattgctgagtctcacctgcagtctatcagcaatttgaatgagaaccaggcctcagaggaggaggatgagctgggggagcttcgggagctgggttatccaagagaggaagatgaggaggaagaggaggatgatgaagaagaggaagaagaagaggacagccaggctgaagtcctgaaggtcatcaggcagtctgctgggcaaaagacaacctgtggccagggtctggaagggccctgggagcgcccaccccctctggatgagtccgagagagatggaggctctgaggaccaagtggaagacccagcactaagtgagcctggggaggaacctcagcgcccttccccctctgagcctggcacatag

SEQ ID NO: 7 - DNA, 1353 bp, Homo sapiens
atgggggcgcccccgggctaccggccctcagcttgggtgcatctcctccaccagctgccccgcgccgacttccagctccgcccggtgcccagcgttttcgcgccccaagagcaggaataccagcaggccttgttgctggtggcggccttggcgggcctgggcttgggcctgagcctcattttcatcgctgtctacctcatccgcttctgctgctgccggccccccgagccccccgggtccaagatcccctcgcccgggggaggctgcgtcacctggagctgcattgtcgcccttctcgccggctgcactggcattggcatcggtttctatggcaacagtgagaccagtgatggggtgtcccagctcagctctgcgctgctgcacgccaaccacacactcagcaccattgaccacctggtgttggagacggtggagaggctgggcgaggcggtgaggacagagctgaccaccctggaggaggtgctcgagccgcgcacggagctggtggctgccgcccgaggggctcgacggcaggcggaggctgcggcccagcagctgcaggggctggccttctggcagggagtgcccctgagccccctgcaggtggctgaaaatgtgtcctttgtggaggagtacaggtggctggcctacgtcctcctgctgctcctggagctgctggtctgcctcttcaccctcctgggcctggcgaagcagagcaagtggctggtgatcgtgatgacagtcatgagtctcctggttctcgtcctgagctggggctccatgggcctggaggcagccacggccgtgggcctcagtgacttctgctccaatccagacccttatgttctgaacctgacccaggaggagacagggctcagctcagacatcctgagctattatctcctctgcaaccgggccgtctccaaccccttccaacagaggctgactctgtcccagcgagctctggccaacatccactcccagctgctgggcctggagcgagaagctgtgcctcagttcccttcagcgcagaagcctctgctgtccttggaggagactctgaatgtgacagaaggaaatttccaccagttggtggcactgctacactgccgcagcctgcacaaggactatggtgcagccctgcggggcctgtgcgaagacgccctggaaggcctgctcttcctgctactcttctccctgctgtctgcaggagcgctggccactgccctctgcagcctgccccgagcctgggccctcttcccacccagtgacgactacgatgacacagacgatgacgaccctttcaaccctcaggaatccaagcgctttgtgcagtggcagtcgtctatctga

SEQ ID NO: 8 - DNA, 3078 bp, Homo sapiens
atggccgggacgtacagctcgactctgaagacgctggaggacttgaccttggactccgggtatggggccggggactcgtgccgctcgctcagcctctcgtcctccaagtccaactcgcaggcgctcaactcttcggcgcagcagcaccgcggggcggcctggtggtgctactccggctccatgaacagccgccacaacagctgggacacggtgaacacggtgctgcccgaggaccccgaagtggccgacctcttctcgcgctgtccgcggctccccgagctggaggagttcccctggaccgaaggagacgtggcccgggtgctccgcaaaggcgctggcggccggcggctgccccagttctccgccgaggcggtgaggcgcctggccgggctgctccgcagggcactgatccgcgtggcccgcgaggcgcagcgcctgagcgtgctgcacgccaagtgcacccgctttgaggtgcagagcgccgtgcgcctggtgcacagctgggcgctggccgagagctgcgcgctggcagccgtcaaggcgctgtccctgtacagcatgagcgccggcgacgggctgcgccggggcaagtccgcgcgctgcggcctcaccttctcagtgggtcgctttttccgctggatggtggacacccgaatctccgtgcgcatccacgagtacgcagccatctccctcaccgcctgcatggagaacctggtggaggagatccgggccagggtgatggccagccacagccctgatggcggaggggccggaggcggggaggtgtctgctgaggccctggagatggtcatcaacaacgacgccgagctctggggcgtcttgcagccctatgagcatctcatctgcggcaagaacgccaatggtgtcctctccctccccgcatacttcagcccctacaacggcgggtccctgggccatgacgagcgagccgatgcctatgcccagctggagctccgaaccctggagcagtccctcctggccacctgcgtgggcagcatctcggagctgagtgacttggtctcccgtgccatgcaccacatgcaggggcgtcaccccctgtgcccgggtgccagccctgcccgccaggcccgccagccgccacagcccatcacttggtcccccgacgccctccacacgctctactactttctgcggtgtccacagatggagtccatggagaaccccaacctggaccccccgagaatgaccttgaacaatgaacggcccttcatgctgctgccgcccctcatggagtggatgcgcgtggccatcacctacgcagagcaccgccgcagcctcaccgtggacagcggcgacatccggcaggcagcccggctgctgctgcctggtctggactgtgaacctcggcagctcaaacccgaacactgtttcagttccttccggaggctggatgcccgagcagctactgaaaaattcaaccaggacctgggtttccgcatgctcaactgtgggaggacggacctcatcaaccaagccatcgaggccttgggtccggatggggttaacaccatggatgaccagggtatgacgccactgatgtacgcctgcgctgctggggacgaagcgatggtccagatgttgattgatgctggggcaaacttggacatccaggttccaagcaactcccccaggcacccttccatccaccccgacagccggcactggacctcactgacattcgctgtgctgcatggacacatctctgtggtccagttgctgctggatgctggtgcccatgtcgagggctcggcagtgaacggcggcgaggacagctatgcggagacgcccctgcagctggcctctgcggcagggaactatgagctggtcagtttgttgctgagccgaggcgccgaccccctcctcagcatgctggaggcccacggcatgggctcctccctccacgaggacatgaactgcttcagccactcagctgcccacggccacaggaacgtcctgaggaagctcctgacgcagccacagcaggctaaagcggacgtgctgtccctggaggagatcctggccgagggtgtggaggaaagtgatgcgtcgagccagggcagtggcagcgaggggcccgtgcggctgagccggacccgcaccaaggccctacaggaggccatgtactacagcgctgagcacggctacgtggacatcaccatggagctgagggcactgggagtcccctggaagctgcacatctggatcgagtctctgaggacctcgttctcgcagtcgcggtactcggtggtgcagagcctcctgcgggacttcagctccatcagagaggaggagtacaacgaggagctggtgaccgagggcttgcagctcatgttcgacatcctcaagaccagcaaaaacgactccgtcatccagcaactggctaccatcttcacccactgctatggcagcagtcccatccccagcatcccagagatccggaagaccctgccggccaggctagatccacactttttgaacaataaggagatgtcagatgtgaccttcctggtggaaggaaagctgttttatgcacataaagtcctgctggtgacagcttctaacaggttcaagacactaatgaccaataaatcagaacaggatggggacagcagcaagaccatcgagatcagcgacatgaagtaccacatttttcagatgatgatgcagtatctgtactacggaggaacagaatccatggagatccccaccactgacatcctggagctgctgtcagctgccagcctgttccagctggatgccctgcagaggcactgcgagatcctgtgctcccagaccctcagcatggagagtgccgtgaacacctacaaatatgccaagatccacaatgccccagaactggccctgttctgtgagggcttcttcctcaagcacatgaaggccctactggagcaggatgccttccggcagctcatctacggccgcagcagcaaagtgcagggcctggatccactgcaggacctgcagaacaccctggcagagcgcgtgcactctgtctacatcacctcccgggtgtga

SEQ ID NO: 9 - DNA, 3600 bp, Homo sapiens
atggcctcagcaggaacacagcactatagtattggcctccgccagaaaaacagcttcaagcagagtggtccctcaggcacagtacctgccacgccacctgagaaaccctcggagggcagagtctggcctcaggcccatcagcaagtgaagccaatctggaagctggaaaagaagcaagtggagacactgtcagcagggttgggcccaggcctcttgggcgtcccaccccagccagcatatttcttttgccccagcactttatgtagctctgggaccacggctgtcattgcaggccacagcagttcctgttacctacactctctcccggacttgttcaacagcaccctgctataccgccgctccagctataggcaaaaaccgtaccagcaactggagtctttctgcttgcgttcgagcccgtcagaaaaaagccctttttctctccctcaaaagagcctccctgtcagtctcactgccaacaaggccacttcttccatggtcttctccatggcccagcccatggcctcctcatccacagaaccatacctctgcttggcagcggctggggaaaacccttcagggaagagcctggcctctgccatctcagggaagatcccatctccactctcttcctcctataagcccatgctgaataataattccttcatgtggccaaatagcacgccagtgcctttattgcagaccacacagggcctgaagccagtatcgccacccaagatccagcctgtctcctggcatcattcagggggtactggagactgtgcaccgcagcctgttgaccataaggtgcccaaaagcattggcactgtcccagctgatgccagtgcccatatcgccttgtctaccgctagctcccacgacacatccaccaccagtgttgcctcttcctggtataaccggaataacttagccatgagggcagagccactttcctgtgctctggatgacagctctgattcccaggatccaactaaggagattcggttcactgaggccgtgaggaaattgaccgcaagaggctttgagaagatgccgaggcaaggctgccagcttgaacagtctagtttcctgaaccccagcttccagtggaatgtcctcaacaggagcaggcggtggaaacctcctgcggtaaatcagcagtttcctcaggaggatgctggatcggtcaggcgggtcctccctggtgcctcagataccttggggttggacaatacagtcttctgtaccaagcgtatcagcattcacctccttgcctcacatgccagtgggctcaatcacaaccctgcctgtgaatctgtaattgactcctcagcatttggagaaggcaaagctccaggtcccccttttcctcaaactcttggcatagccaacgtggccacccgcctctcttccatccagctgggccagtctgagaaggagagacctgaggaggccagggagctggactcatctgatagggatattagttcagctactgacctccagccagatcaggctgagactgaagatacagaagaagaactagtagatggtttggaagactgttgtagccgtgatgagaatgaagaggaggagggagactcagagtgctcctcattaagtgctgtctcccccagcgaatcggtggccatgatctctagaagctgtatggaaattctgaccaaacccctttccaatcatgagaaagttgtccgaccagccctcatctacagtctctttcccaacgttccccctaccatctattttggcactcgggatgagagagtggagaaacttccctgggaacagaggaagttgctccgatggaagatgagcacagtgacccccaacattgtcaagcagaccattggacggtcccacttcaaaatcagcaaaagaaacgatgactggctgggctgctggggtcaccacatgaagtctcctagtttccgatccattcgagagcatcagaagctaaaccatttcccaggctcattccagattgggaggaaggaccggctatggcggaacctgtcacgtatgcagagccgctttggcaagaaggagttcagtttcttcccccagtcctttatcctgccccaggacgccaagctcctgcgcaaagcgtgggagagcagcagccgccaaaagtggattgtgaagccaccagcatcagctcgaggcattggcatccaggttattcacaagtggagtcagctccccaagcgaaggcccctcctggtacagaggtatctacacaaaccctacctcatcagcggcagcaagtttgacctgcggatctatgtttatgtcacttcctacgatcctctgcggatttacctcttttcagatggactggtccgctttgccagttgcaagtattcgccttccatgaagagccttggcaataagttcatgcacctgaccaactacagtgtcaataaaaagaatgccgagtaccaggccaatgcagatgaaatggcttgccagggccacaaatgggcactgaaggctttgtggaactacctgagccagaagggagtcaatagcgacgccatctgggagaagataaaggatgttgttgtcaaaactatcatctcgtcagagccctatgtgaccagcctgctcaagatgtatgtgcgacggccctatagctgccatgaactctttggttttgacatcatgctagacgaaaacctcaagccctgggtcctggaagtcaacatttccccaagcctccactccagctctccactggatatcagcatcaaaggccagatgattcgtgaccttctgaatctggcaggttttgtcctgcccaatgcagaggatatcatttccagccccagcagctgcagcagctccaccaccagcctgcccacctcccctggggacaaatgtcgaatggctccagagcatgtcactgcacagaagatgaagaaagcctattatctgacccagaaaattcctgatcaggacttctatgcatctgtgctggatgtcctgacaccagatgatgttcggattctggttgagatggaagatgagttttctcgccgtggtcagtttgaacgaatttttccttctcatatctcctctcgctatctccgcttttttgagcagccacgatatttcaacattctcaccacccaatgggaacagaaataccatggcaacaagcttaaaggagtagatctgctccggagttggtgctacaaagggttccacatgggagttgtctctgattctgctccagtgtggtctctcccgacatcacttctgactatctcaaaggatgacgtgatactcaatgccttcagcaaatcagagactagcaagctgggaaaacaaagctcctgtgaggttagcctactactctctgaagacgggaccacgcccaaatccaagaagactcaagctggcctttccccttatccccagaaacccagttcctcaaaggacagtgaggacaccagcaaagagcccagcctttctacccagacgttacctgtgatcaagtgctctgggcagacttcaagactttctgcttcctccactttccagtcaatcagtgactccctcctggctgtgagcccataa

SEQ ID NO: 10 - DNA, 1698 bp, Homo sapiens
atgaattatgagggagccaggagtgagagagagaaccacgctgctgatgactccgagggaggggccctggacatgtgctgcagtgagaggctaccgggtctcccccagccgatagtgatggaggcactggacgaggctgaagggctccaggactcacagagagagatgccgccaccccctcctccctcgccgccctcagatccagctcagaagccaccacctcgaggcgctgggagccactccctcactgtcaggagcagcctgtgcctgttcgctgcctcacagttcctgcttgcctgtggggtgctctggttcagcggttatggccacatctggtcacagaacgccacaaacctcgtctcctctttgctgacgctcctgaaacagctggaacccacggcctggcttgactctgggacgtggggagtccccagtctgctgctggtctttctgtccgtgggcctggtcctcgttaccaccctggtgtggcacctcctgaggacacccccagagccacccaccccactgccccctgaggacaggcgccagtcagtgagccgccagccctccttcacctactcagagtggatggaggagaagatcgaggatgacttcctggacctcgacccggtgcccgagactcctgtgtttgattgtgtgatggacatcaagcctgaggctgaccccacctcactcaccgtcaagtccatgggtctgcaggagaggaggggttccaatgtctccctgaccctggacatgtgcactccgggctgcaacgaggagggctttggctatctcatgtccccacgtgaggagtccgcccgcgagtacctgctcagcgcctcccgtgtcctccaagcagaagagcttcatgaaaaggccctggaccctttcctgctgcaggcggaattctttgaaatccccatgaactttgtggatccgaaagagtacgacatccctgggctggtgcggaagaaccggtacaaaaccatacttcccaaccctcacagcagagtgtgtctgacctcaccagaccctgacgaccctctgagttcctacatcaatgccaactacatccggggctatggtggggaggagaaggtgtacatcgccactcagggacccatcgtcagcacggtcgccgacttctggcgcatggtgtggcaggagcacacgcccatcattgtcatgatcaccaacatcgaggagatgaacgagaaatgcaccgagtattggccggaggagcaggtggcgtacgacggtgttgagatcactgtgcagaaagtcattcacacggaggattaccggctgcgactcatctccctcaagagtgggactgaggagcgaggcctgaagcattactggttcacatcctggcccgaccagaagaccccagaccgggcccccccactcctgcacctggtgcgggaggtggaggaggcagcccagcaggaggggccccactgtgcccccatcatcgtccactgcagtgcagggattgggaggaccggctgcttcattgccaccagcatctgctgccagcagctgcggcaggagggtgtggtggacatcctgaagaccacgtgccagctccgtcaggacaggggcggcatgatccagacatgcgagcagtaccagtttgtgcaccacgtcatgagcctctacgaaaagcagctgtcccaccagtccccagaatga

SEQ ID NO: 11 - DNA, 1359 bp, Homo sapiens
atgtctgagactcctgctcagtgtagcattaagcaggaacgaatttcatatacacctccagagagcccagtgccgagttacgcttcctcgacgccacttcatgttccagtgcctcgagcgctcaggatggaggaagactcgatccgcctgcctgcgcacctgcgcttgcagccaatttactggagcagggatgacgtagcccagtggctcaagtgggctgaaaatgagttttctttaaggccaattgacagcaacacgtttgaaatgaatggcaaagctctcctgctgctgaccaaagaggactttcgctatcgatctcctcattcaggtgatgtgctctatgaactccttcagcatattctgaagcagaggaaacctcggattcttttttcaccattcttccaccctggaaactctatacacacacagccggaggtcatactgcatcagaaccatgaagaagataactgtgtccagaggacccccaggccatccgtggataatgtgcaccataaccctcccaccattgaactgttgcaccgctccaggtcacctatcacgacaaatcaccggccttctcctgaccccgagcagcggcccctccggtcccccctggacaacatgatccgccgcctctccccggctgagagagctcagggacccaggccgcaccaggagaacaaccaccaggagtcctaccctctgtcagtgtctcccatggagaataatcactgcccagcgtcctccgagtcccacccgaagccatccagcccccggcaggagagcacacgcgtgatccagctgatgcccagccccatcatgcaccctctgatcctgaacccccggcactccgtggatttcaaacagtccaggctctccgaggacgggctgcatagggaagggaagcccatcaacctctctcatcgggaagacctggcttacatgaaccacatcatggtctctgtctccccgcctgaagagcacgccatgcccattgggagaatagcagactgtagactgctttgggattacgtctatcagttgctttctgacagccggtacgaaaacttcatccgatgggaggacaaagaatccaaaatattccggatagtggatcccaacggactggctcgactgtggggaaaccataagaacagaacaaacatgacctatgagaaaatgtccagagccctgcgccactactacaaactaaacattatcaggaaggagccaggacaaaggcttttgttcaggtttatgaaaaccccagatgaaatcatgagtggccgaacagaccgtctggagcacctagagtcccaggagctggatgaacaaatataccaagaagatgaatgctga

SEQ ID NO: 12 - DNA, 2220 bp, Homo sapiens
atggccccgtggctgcagctctgctccgtcttctttacggtcaacgcctgcctcaacggctcgcagctggctgtggccgctggcgggtccggccgcgcgcggggcgccgacacctgtggctggaggggagtggggccagccagcagaaacagtgggctgtacaacatcaccttcaaatatgacaattgtaccacctacttgaatccagtggggaagcatgtgattgctgacgcccagaatatcaccatcagccagtatgcttgccatgaccaagtggcagtcaccattctttggtccccaggggccctcggcatcgaattcctgaaaggatttcgggtaatactggaggagctgaagtcggagggaagacagtgccaacaactgattctaaaggatccgaagcagctcaacagtagcttcaaaagaactggaatggaatctcaacctttcctgaatatgaaatttgaaacggattatttcgtaaaggttgtcccttttccttccattaaaaacgaaagcaattaccaccctttcttctttagaacccgagcctgtgacctgttgttacagccggacaatctagcttgtaaacccttctggaagcctcggaacctgaacatcagccagcatggctcggacatgcaggtgtccttcgaccatgcaccgcacaacttcggcttccgtttcttctatcttcactacaagctcaagcacgaaggacctttcaagcgaaagacctgtaagcaggagcaaactacagagacgaccagctgcctccttcaaaatgtttctccaggggattatataattgagctggtggatgacactaacacaacaagaaaagtgatgcattatgccttaaagccagtgcactccccgtgggccgggcccatcagagccgtggccatcacagtgccactggtagtcatatcggcattcgcgacgctcttcactgtgatgtgccgcaagaagcaacaagaaaatatatattcacatttagatgaagagagctctgagtcttccacatacactgcagcactcccaagagagaggctccggccgcggccgaaggtctttctctgctattccagtaaagatggccagaatcacatgaatgtcgtccagtgtttcgcctacttcctccaggacttctgtggctgtgaggtggctctggacctgtgggaagacttcagcctctgtagagaagggcagagagaatgggtcatccagaagatccacgagtcccagttcatcattgtggtttgttccaaaggtatgaagtactttgtggacaagaagaactacaaacacaaaggaggtggccgaggctcggggaaaggagagctcttcctggtggcggtgtcagccattgccgaaaagctccgccaggccaagcagagttcgtccgcggcgctcagcaagtttatcgccgtctactttgattattcctgcgagggagacgtccccggtatcctagacctgagtaccaagtacagactcatggacaatcttcctcagctctgttcccacttgcactcccgagaccacggcctccaggagccggggcagcacacgcgacagggcagcagaaggaactacttccggagcaagtcaggccggtccctatacgtcgccatttgcaacatgcaccagtttattgacgaggagcccgactggttcgaaaagcagttcgttcccttccatcctcctccactgcgctaccgggagccagtcttggagaaatttgattcgggcttggttttaaatgatgtcatgtgcaaaccagggcctgagagtgacttctgcctaaaggtagaggcggctgttcttggggcaaccggaccagccgactcccagcacgagagtcagcatgggggcctggaccaagacggggaggcccggcctgcccttgacggtagcgccgccctgcaacccctgctgcacacggtgaaagccggcagcccctcggacatgccgcgggactcaggcatctatgactcgtctgtgccctcatccgagctgtctctgccactgatggaaggactctcgacggaccagacagaaacgtcttccctgacggagagcgtgtcctcctcttcaggcctgggtgaggaggaacctcctgcccttccttccaagctcctctcttctgggtcatgcaaagcagatcttggttgccgcagctacactgatgaactccacgcggtcgcccctttgtaa

SEQ ID NO: 13 - DNA, 1617 bp, Homo sapiens
atgctgcagatcggggaggacgtcgactatttgctcatcccccgggaggtcaggctggctgggggcgtctggagagtcatctctaagcccgccaccaaggaagcagaatttcgggagcggctgacccagttcctggaagaagagggccgcaccctggaggacgtggcccgcatcatggagaagagcaccccgcacccgccccagccccccaaaaagcccaaggagccccgagtgaggaggagagtgcagcagatggtgactcctccgccccggctggtcgtgggcacgtacgacagcagcaacgccagcgacagcgagttcagcgacttcgagacctccagagacaagagccgccagggcccgcggcggggcaagaaggtgcgcaaaatgcccgtcagctacctgggcagcaagttcctgggaagcgacctggagagtgaggatgatgaggaactggtcgaggccttcctccggcgacaggagaagcagcccagcgcgccgcctgcccgccgccgcgtcaacctgccagtgcccatgtttgaggacaacctggggcctcagctgtccaaagcggacaggtggcgggagtatgtcagccaggtgtcctgggggaagctgaagcggagggtgaagggttgggcgccgagggcgggccccggggtgggcgaggcccggctggcctccaccgcagtggagagcgcaggggtatcatcggcgccagagggcaccagcccgggggatcgcttgggaaacgcgggagatgtttgtgtgccccaggcttcccctaggcgatggaggcccaagatcaactgggcctcctttcggcgccgcaggaaggagcagacagcacccacaggtcagggggcagacatcgaggctgatcaggggggagaggctgcagatagtcaaagggaagaggccatagctgaccagcgggaaggggctgcaggtaatcagagggcaggggccccagctgaccagggggcagaggctgcagataatcagagggaagaggctgcagataatcagagggcaggggccccagctgaggagggggcagaggctgcagataaccagagggaagaggctgcagataatcagagggcagaggccccagctgaccagaggtcacagggcacagataaccacagggaagaggctgcagataatcagagggcggaggccccagctgaccaggggtcagaggttacagataatcaaagggaagaggccgtacatgaccagagggaaagggccccagctgtccagggtgcagataatcagagggcacaggcccgggctggccagagggcagaggctgcacataatcagagggcaggggccccaggtatccaggaagctgaagtctcagctgcccaagggaccacaggaacagctccaggagccagggcccggaaacaggtcaagacagtgaggttccagacccctggacgcttttcgtggttttgcaagcgccggagagccttctggcacactccccggttgccaaccctgcccaagagagtccccagggcaggagaggccaggaacctcagggtgctgagggccgaggccagagcagaagctgagcagggagagcaagaagaccagctgtga

SEQ ID NO: 14 - DNA, 4842 bp, Homo sapiens
atgggggccgtcctgaggagcctcctggcctgcagcttctgtgtgctcctgagagcggcccctttgttgctttatgcaaacagacgggacttgcgattggttgatgctacaaatggcaaagagaatgctacgattgtagttggaggcttggaggatgcagctgcggtggactttgtgtttagtcatggcttgatatactggagtgatgtcagcgaagaagccattaaacgaacagaatttaacaaaactgagagtgtgcagaatgttgttgtttctggattattgtcccccgatgggctggcatgtgattggcttggagaaaaattgtactggacagattctgaaactaatcggattgaagtttctaatttagatggatctttacgaaaagttttattttggcaagagttggatcaacccagagctattgccttagatccttcaagtgggttcatgtactggacagactggggagaagtgccaaagatagaacgtgctggaatggatggttcaagtcgcttcattataataaacagtgaaatttactggccaaatggactgactttggattatgaagaacaaaagctttattgggcagatgcaaaacttaatttcatccacaaatcaaatctggatggaacaaatcggcaggcagtggttaaaggttcccttccacatccttttgccttgacgttatttgaggacatattgtactggactgactggagcacacactccattttggcttgcaacaagtatactggtgagggtctgcgtgaaatccattctgacatcttctctcccatggatatacatgccttcagccaacagaggcagccaaatgccacaaatccatgtggaattgacaatgggggttgttcccatttgtgtttgatgtctccagtcaagcctttttatcagtgtgcttgccccactggggtcaaactcctggagaatggaaaaacctgcaaagatggtgccacagaattattgcttttagctcgaaggacagacttgagacgcatttctttggatacaccagattttacagacattgttctgcagttagaagacatccgtcatgccattgccatagattacgatcctgtggaaggctacatctactggactgatgatgaagtgagggccatacgccgttcatttatagatggatctggcagtcagtttgtggtcactgctcaaattgcccatcctgatggtattgctgtggactgggttgcacgaaatctttattggacagacactggcactgatcgaatagaagtgacaaggctcaatgggaccatgaggaagatcttgatttcagaggacttagaggaaccccgggctattgtgttagatcccatggttgggtacatgtattggactgactggggagaaattccgaaaattgagcgagcagctctggatggttctgaccgtgtagtattggttaacacttctcttggttggccaaatggtttagccttggattatgatgaaggcaaaatatactggggagatgccaaaacagacaagattgaggttatgaatactgatggcactgggagacgagtactagtggaagacaaaattcctcacatatttggatttactttgttgggtgactatgtttactggactgactggcagaggcgtagcattgaaagagttcataaacgaagtgcagagagggaagtgatcatagatcagctgcctgacctcatgggcctaaaggctacaaatgttcatcgagtgattggttccaacccctgtgctgaggaaaacgggggatgtagccatctctgcctctatagacctcagggccttcgctgtgcttgccctattggctttgaactcatcagtgacatgaagacctgcattgtcccagaggctttccttttgttttcacggagagcagatatcagacgaatttctctggaaacaaacaataataatgtggctattccactcactggtgtcaaagaagcttctgctttggattttgatgtgacagacaaccgaatttattggactgatatatcactcaagaccatcagcagagcctttatgaatggcagtgcactggaacatgtggtagaattcggcttagattatccagaaggcatggcagtagactggcttgggaagaacttgtactgggcagacacaggaacgaatcgaattgaggtgtcaaagttggatgggcagcaccgacaagttttggtgtggaaagacctagatagtcccagagctctcgcgttggaccctgccgaaggatttatgtattggactgaatggggtggaaaacctaagatagacagagctgcaatggatggaagtgaacgtactaccttagttccaaatgtggggcgggcaaacggcctaactattgattatgctaaaaggaggctttattggacagacctggacaccaacttaatagaatcttcaaatatgcttgggctcaaccgtgaagttatagcagatgacttgcctcatccttttggcttaactcagtaccaagattatatctactggacggactggagccgacgcagcattgagcgtgccaacaaaaccagtggccaaaaccgcaccatcattcagggccatttggattatgtgatggacatcctcgtctttcactcatctcgacagtcagggtggaatgaatgtgcttccagcaatgggcactgctcccacctctgcttggctgtgccagttgggggttttgtttgtggatgccctgcccactactctcttaatgctgacaacaggacttgtagtgctcctacgactttcctgctcttcagtcaaaagagtgccatcaaccgcatggtgattgatgaacaacagagccccgacatcatccttcccatccacagccttcggaatgtccgggccattgactatgacccactggacaagcaactctattggattgactcacgacaaaacatgatccgaaaggcacaagaagatggcagccagggctttactgtggttgtgagctcagttccgagtcagaacctggaaatacaaccctatgacctcagcattgatatttacagccgctacatctactggacttgtgaggctaccaatgtcattaatgtgacaagattagatgggagatcagttggagtggtgctgaaaggcgagcaggacagacctcgagccgttgtggtaaacccagagaaagggtatatgtattttaccaatcttcaggaaaggtctcctaaaattgaacgggctgctttggatgggacagaacgggaggtcctctttttcagtggcttaagtaaaccaattgctttagcccttgatagcaggctgggcaagctcttttgggctgattcagatctccggcgaattgaaagcagtgatctctcaggtgctaaccggatagtattagaagactccaatatcttgcagcctgtgggacttactgtgtttgaaaactggctctattggattgataaacagcagcaaatgattgaaaaaattgacatgacaggtcgagagggtagaaccaaagtccaagctcgaattgcccagcttagtgacattcatgcagtaaaggagctgaaccttcaagaatacagacagcacccttgtgctcaggataatggtggctgttcacatatttgtcttgtaaagggggatggtactacaaggtgttcttgccccatgcacctggttctacttcaagatgagctatcatgtggagaacctccaacatgttctcctcagcagtttacttgtttcacgggggaaattgactgtatccctgtggcttggcggtgcgatgggtttactgaatgtgaagaccacagtgatgaactcaattgtcctgtatgctcagagtcccagttccagtgtgccagtgggcagtgtattgatggtgccctccgatgcaatggagatgcaaactgccaggacaaatcagatgagaagaactgtgaagtgctttgtttaattgatcagttccgctgtgccaatggtcagtgcattggaaagcacaagaagtgtgatcataatgtggattgcagtgacaagtcagatgaactggattgttatccgactgaagaaccagcaccacaggccaccaatacagttggttctgttattggcgtaattgtcaccatttttgtgtctggaactgtatactttatctgccagaggatgttgtgtccacgtatgaagggagatggggaaactatgactaatgactatgtagttcatggaccagcttctgtgcctcttggttatgtgccacacccaagttctttgtcaggatctcttccaggaatgtctcgaggtaaatcaatgatcagctccctcagtatcatggggggaagcagtggacccccctatgaccgagcccatgttacaggagcatcatcaagtagttcttcaagcaccaaaggcacttacttccctgcaattttgaaccctccaccatccccagccacagagcgatcacattacactatggaatttggatattcttcaaacagtccttccactcataggtcatacagctacaggccatatagctaccggcactttgcaccccccaccacaccctgcagcacagatgtttgtgacagtgactatgctcctagtcggagaatgacctcagtggcaacagccaagggctataccagtgacttgaactatgattcagaacctgtgcccccacctcccacaccccgaagccaatacttgtcagcagaggagaactatgaaagctgcccaccttctccatacacagagaggagctattctcatcacctctacccaccgccaccctctccctgtacagactcctcctga

SEQ ID NO: 15 - DNA, 1542 bp, Homo sapiens
atggccatggagatagacagcaggcctggggggctccccggcagtagctgcaacctaggtgcagcccgagaacacatgcaggcggtcacccgaaactacatcacccacccccgtgtcacctacaggactgtgtgcagcgtgaacgggcccctggtggtgctggaccgggtcaagtttgcccagtatgcggagatcgtccacttcaccctcccagatgggactcagaggagcgggcaggtgcttgaggtggctggcaccaaggcgattgttcaggtgtttgaagggacatcagggatcgatgccaggaagaccacttgcgaatttacaggggacatcctacgaactccggtgtcagaggacatgctgggtcgggttttcaatggctccggcaagcccattgacaaggggccagtggtcatggcggaggactttctggatatcaatggccagcccatcaacccgcactcccgcatctaccccgaggagatgattcagacgggcatttctcctattgacgtcatgaacagcattgcccgcggccagaagatccccatcttctcagcagccgggctcccccacaatgagattgccgctcagatctgccgccaggcggggctggtgaagaagtccaaggctgtgctggattaccatgacgacaacttcgccatcgtctttgcagccatgggggtgaacatggagacagccagattcttcaagtctgactttgagcagaatggaaccatggggaacgtctgcctcttcctgaacttggccaatgaccccacgatcgagcggatcatcaccccgcgcctggcgctgaccactgctgaattccttgcctaccagtgtgagaagcatgtgctggtcatactgacggacatgagttcctatgcagaggccttgcgggaggtctctgctgctagagaggaggtgcctgggcgccgagggtttcctggatatatgtacacagacctggccaccatctacgagcgggcgggccgcgtggagggtcggggaggatccatcacacagatccccatcctcaccatgcccaacgacgatatcacccaccctatcccagacttgacgggcttcatcacagagggacagatctacgtggacagacagcttcacaacagacagatctacccccccatcaacgtgctcccttccctgtcgcggctgatgaagtcagccattggggaaggcatgacaagaaaggaccatggagatgtctccaaccagctgtacgcctgctatgccatcgggaaggacgtgcaggccatgaaggcagtagttggggaggaggcgctcacctctgaggacctgctctacctggaattcctgcagaagtttgagaagaacttcatcaatcagggcccctacgagaaccgctcggtgttcgagtcgctggacctgggctggaagctgctgcgcatcttccccaaggagatgctgaagcgcattccgcaggccgtgatcgacgagttctattcccgcgagggggcgctgcaggacctcgcgcctgacactgcgctctag

SEQ ID NO: 16 - DNA, 2076 bp, Homo sapiens
atgaagaaagacgtgcggatcctgctggtgggagaacctagagttgggaagacatcactgattatgtctctggtcagtgaagaatttccagaagaggttcctccccgggcagaagaaatcaccattccagctgatgtcaccccagagagagttccaacacacattgtagattactcagaagcagaacagagtgatgaacaacttcatcaagaaatatctcaggctaatgtcatctgtatagtgtatgccgttaacaacaagcattctattgataaggtaacaagtcgatggattcctctcataaatgaaagaacagacaaagacagcaggctgcctttaatattggttgggaacaaatctgatctggtggaatatagtagtatggagaccatccttcctattatgaaccagtatacagaaatagaaacctgtgtggagtgttcagcgaaaaacctgaagaacatatcagagctcttttattacgcacagaaagctgttcttcatcctacagggcccctgtactgcccagaggagaaggagatgaaaccagcttgtataaaagcccttactcgtatatttaaaatatctgatcaagataatgatggtactctcaatgatgctgaactcaacttctttcagaggatttgtttcaacactccattagctcctcaagctctggaggatgtcaagaatgtagtcagaaaacatataagtgatggtgtggctgacagtgggttgaccctgaaaggttttctctttttacacacactttttatccagagagggagacacgaaactacttggactgtgcttcgacgatttggttatgatgatgacctggatttgacacctgaatatttgttccccctgctgaaaatacctcctgattgcactactgaattaaatcatcatgcatatttatttctccaaagcacctttgacaagcatgatttggatagagactgtgctttgtcacctgatgagcttaaagatttatttaaagttttcccttacataccttgggggccagatgtgaataacacagtttgtaccaatgaaagaggctggataacctaccagggattcctttcccagtggacgctcacgacttatttagatgtacagcggtgcctggaatatttgggctatctaggctattcaatattgactgagcaagagtctcaagcttcagctgttacagtgacaagagataaaaagatagacctgcagaaaaaacaaactcaaagaaatgtgttcagatgtaatgtaattggagtgaaaaactgtgggaaaagtggagttcttcaggctcttcttggaagaaacttaatgaggcagaagaaaattcgtgaagatcataaatcctactatgcgattaacactgtttatgtatatggacaagagaaatacttgttgttgcatgatatctcagaatcggaatttctaactgaagctgaaatcatttgtgatgttgtatgcctggtatatgatgtcagcaatcccaaatcctttgaatactgtgccaggatttttaagcaacactttatggacagcagaataccttgcttaatcgtagctgcaaagtcagacctgcatgaagttaaacaagaatacagtatttcacctactgatttctgcaggaaacacaaaatgcctccaccacaagccttcacttgcaatactgctgatgcccccagtaaggatatctttgttaaattgacaacaatggccatgtatccagaggatcattacagagacagactctcccgagacatgggccacactgatagaatagagaatttgagaaaaatctgggtctttctaaaaactgctttccatgcccggttacgctgtatgtgcacctgcaacaggtgtacattttgcatctgtcagaacttcctcaactcagacttgctgcaatctgtaaagaacaaaatcttcactgcagttcttaacaggcacgtgacacaagctgacctcaagagctccacgttttggcttcgagcaagttttggtgctactgtttttgcagttttgggctttgctatgtacaaagcattattgaaacagcgatga

SEQ ID NO: 17 - DNA, 3948 bp, Homo sapiens
atggaaaagtaccacgtgttggagatgattggagaaggctcttttgggagggtgtacaagggtcgaagaaaatacagtgctcaggtcgtggccctgaagttcatcccaaaattggggcgctcagagaaggagctgaggaatttgcaacgagagattgaaataatgcggggtctgcggcatcccaacattgtgcatatgcttgacagctttgaaactgataaagaggtggtggtggtgacagactatgctgagggagagctctttcagatcctagaagatgacggaaaacttcctgaagaccaggttcaggccattgctgcccagttggtgtcagccctgtactatctgcattcccaccgcatcctacaccgagatatgaagcctcagaacatcctcctcgccaagggtggtggcatcaagctctgtgactttggatttgcccgggctatgagcaccaatacaatggtgctgacatccatcaaaggcacaccactctatatgtctccagagctggtggaggagcgaccatacgaccacacagcggacctctggtctgttggctgcatactatatgaactggcagtaggcacccctcccttctatgctacaagcatctttcagctggtcagcctcattctcaaggaccctgtgcgctggccctcaaccatcagtccctgctttaagaacttcctgcagggactgctcaccaaagacccacggcagcgactgtcctggccagacctcttatatcacccctttattgctggtcatgtcaccataataactgagccagcaggcccagatttggggaccccattcaccagccgcctacccccagaacttcaggtcctaaaggacgaacaggcccatcggttggcccccaagggtaatcagtctcgcatcttgactcaggcctataaacgcatggctgaggaggccatgcagaagaaacatcagaacacaggacctgcccttgagcaagaggacaagaccagcaaggtggctcctggcacagcccctctgcccagactcggggccactcctcaggaatcaagcctcctggccgggatcttagcctcagaattgaagagcagctgggctaaatcagggactggagaggtgccctctgcacctcgggaaaaccggaccaccccagattgtgaacgagcattcccagaggagaggccagaggtgctgggccagcggagcactgatgtagtggacctggaaaatgaggagccagacagtgacaatgagtggcagcacctgctagagaccactgagcctgtgcctattcaactgaaggctcctctcaccttgctgtgtaatcctgacttctgccagcgcatccagagtcagctgcatgaagctggagggcagatcctgaaaggcatcttggagggtgcttcccacatcctgcctgcattccgggtcctgagcagtcttctctccagctgcagtgattctgttgccttgtattccttctgccgggaggcagggcttcctgggctgctgctgagtctactcaggcacagtcaggagagcaacagcctccagcagcaatcttggtatgggaccttcttacaggacctgatggctgtgattcaggcctactttgcctgtaccttcaatctggagaggagccagacaagtgacagcctgcaggtgtttcaggaggctgccaacctttttctggacctgttggggaaactgctggcccaaccagatgactctgagcagactttgcggagggacagccttatgtgctttactgtcctgtgcgaagccatggatgggaacagccgggccatctccaaagccttttactccagcttgctgacgacacagcaggttgtcttggatgggctccttcatggcttgacagttccacagctccctgtccacactccccaaggagccccgcaagtgagccagccactgcgagagcagagtgaggatatacctggagccatttcctctgccctggcagccatatgcactgctcctgtgggactgcccgactgctgggatgccaaggagcaggtctgttggcatttggcaaatcagctaactgaagacagcagccagctcaggccatccctcatctctggcctgcagcatcccatcctgtgcctgcaccttctcaaggttctatactcctgctgccttgtcagtgagggcctgtgccgtcttctggggcaggagcccctggccttggaatccctgtttatgttgattcagggcaaggtaaaagtagtagattgggaagagtctactgaagtgacactctacttcctctcccttcttgtctttcggctccaaaacctgccttgtggaatggagaagctaggcagtgacgttgctactctctttacccattcgcatgtcgtctctcttgtgagtgcagcagcctgtctattgggacagcttggtcagcaaggggtgacctttgacctccagcccatggaatggatggctgcagccacacatgccttgtctgcccctgcagaggttcggttgactccaccaggtagttgtggattctatgatggcctccttatccttctgttgcagctcctcactgagcaggggaaggctagcctaatcagggatatgtccagttcagaaatgtggaccgttttgtggcaccgcttctccatggtcctgaggctccccgaggaggcatctgcacaggaaggggagctttcgctatccagtccaccaagccctgagccagactggacactgatttctccccagggcatggcagccctgctgagcctggccatggccacctttacccaggagccccagttatgcctgagctgcctgtcccagcatggaagtatcctcatgtccatcctgaagcatctgctttgccccagcttcctgaatcaactgcgccaggcgcctcatgggtctgagtttctccctgtcgtggtgctctctgtctgccagctcctttgcttcccctttgcgctggacatggatgctgacctccttataggtgtcttggccgacctcagggactcagaagttgcagcccatctgctgcaggtctgctgctaccatcttccgttgatgcaagtggagctgcccatcagccttctcacacgcctggccctcatggatcccacctctctcaaccagtttgtgaacacagtgtctgcctcccctagaaccatcgtctcgtttctctcagttgccctcctgagtgaccagccactgttgacctccgaccttctctctctgctggcccatactgccagggtcctgtctcccagccacttgtcctttatccaagagcttctggctggctctgatgaatcctatcggcccctgcgcagcctcctgggccacccagagaattctgtgcgggcacacacttataggctcctgggacacttgctccaacacagcatggccctgcgtggggcactgcagagccagtctggactgctcagccttctgctgcttgggcttggagacaaggatcctgttgtgcggtgcagtgccagctttgctgtgggcaatgcagcctaccaggctggtcctctgggacctgccctggcagctgcagtgcccagtatgacccagctgcttggagatcctcaggctggtatccggcgcaatgttgcatcagctctgggcaacttgggacctgaaggtttgggagaggagctgttacagtgcgaagtaccccagcggctcctagaaatggcatgtggagacccccagccaaatgtgaaggaggctgccctcattgccctccggagcctgcaacaggagcctggcatccatcaggtactggtgtccctgggtgccagtgagaaactatccttgctctctctggggaatcagtcactgccacacagcagtcctaggcctgcctctgccaaacactgcaggaaactcattcacctcctgaggccagcccatagcatgtga

SEQ ID NO: 18 - DNA, 378 bp, Homo sapiens
atggccggccccagcctcgcttgctgtctgctcggcctcctggcgctgacctccgcctgctacatccagaactgccccctgggaggcaagagggccgcgccggacctcgacgtgcgcaagtgcctcccctgcggccccgggggcaaaggccgctgcttcgggcccaatatctgctgcgcggaagagctgggctgcttcgtgggcaccgccgaagcgctgcgctgccaggaggagaactacctgccgtcgccctgccagtccggccagaaggcgtgcgggagcgggggccgctgcgcggtcttgggcctctgctgcagcccggacggctgccacgccgaccctgcctgcgacgcggaagccaccttctcccagcgctga

SEQ ID NO: 19 - DNA, 4626 bp, Homo sapiens
atgtcgttccttgaagaggcgagggcagcggggcgcgcggtggtcctggcgttggtgctgctgctgctccccgccgtgcccgtgggcgccagcgttccgccgcggcccctgctcccgctgcagcccggcatgccccacgtgtgtgctgagcaggagctgaccctggtgggccgccgccagccgtgcgtgcaggccttaagccacacggtgccggtgtggaaggccggctgtgggtggcaggcgtggtgcgtgggtcatgagcggagaaccgtctactacatgggctacaggcaggtgtataccacggaggcccggaccgtgctcaggtgctgccgagggtggatgcagcagcccgacgaggagggctgcctctcggctgaatgcagcgccagcctctgttttcacggtggccgttgtgtgccaggctcagcccagccgtgtcactgtccccccggcttccagggaccccgctgtcagtatgatgtggacgaatgccgaacccacaacggtggctgccagcaccggtgcgtgaacaccccaggctcctacctctgtgagtgcaagcccggcttccggctccacactgacagcaggacctgcctggccattaactcctgcgccctgggcaatggcggctgccagcaccactgtgtccagctcacaatcactcggcatcgctgccagtgccggcccgggttccagctccaggaggacggcaggcattgtgtccgtagaagcccgtgtgccaacaggaacggcagctgcatgcacaggtgccaggtggtccggggcctcgcccgctgtgagtgccacgtgggctatcagctagcagcggacggcaaggcctgtgaagatgtggacgaatgtgccgcagggctggcccagtgtgcccatggctgcctcaacacccaggggtccttcaagtgcgtgtgtcacgcgggctatgagctgggcgccgatggccggcagtgctaccggattgagatggaaatcgtgaacagctgtgaggccaacaacggcggctgctcccatggctgcagccacaccagtgctgggcccctgtgcacatgtccccgcggctacgagctggacacagatcagaggacctgcatcgatgtcgacgactgtgcagacagcccgtgctgccagcaggtgtgcaccaacaaccctggcgggtacgagtgcggctgctacgccggctaccggctcagtgccgatggctgcggctgtgaggatgtggatgagtgcgcctccagccgtggcggctgcgagcaccactgcaccaacctggccggctccttccagtgctcctgcgaggccggctaccggctgcacgaggaccgtaggggctgcagccccctggaggagccgatggtggacctggacggcgagctgcctttcgtgcggcccctgccccacattgccgtgctccaggacgagctgccgcaactcttccaggatgacgacgtcggggccgatgaggaagaggcagagttgcggggcgaacacacgctcacagagaagtttgtctgcctggatgactcctttggccatgactgcagcttgacctgtgatgactgcaggaacggagggacctgcctcctgggcctggatggctgtgattgccccgagggctggactgggctcatctgcaatgagacttgtcctccggacacctttgggaagaactgcagcttctcctgcagctgtcagaatggtgggacctgcgactctgtcacgggggcctgccgctgccccccgggtgtcagtggaactaactgtgaggatggctgccccaagggctactatggcaagcactgtcgcaagaaatgcaactgtgccaaccggggccggtgccaccgcctctacggggcctgcctctgcgacccagggctctacggccgcttctgccacctcacctgcccgccgtgggcctttgggccgggctgctcggaggagtgccagtgtgtgcagccccacacgcagtcctgtgacaagagggatggcagctgctcctgcaaggctggcttccggggcgagcgctgtcaggcagagtgtgagctgggctactttgggccggggtgctggcaggcatgcacctgcccagtgggcgtggcctgtgactccgtgagcggcgagtgtgggaagcggtgtcctgctggcttccagggagaggactgtggccaagagtgcccggtggggacgtttggcgtgaactgctcgagctcctgctcctgtgggggggccccctgccacggggtcacggggcagtgccggtgtccgccggggaggactggggaagactgtgaggcagattgtcccgagggccgctgggggctgggctgccaggagatctgcccagcatgccagcacgctgcccgctgcgaccctgagaccggagcctgcctgtgcctccctggcttcgtcggcagccgctgccaggacgtgtgcccagcaggctggtatggtcccagctgccagacaaggtgctcttgtgccaatgatgggcactgccacccagccaccggacactgcagctgtgcccccgggtggaccggctttagctgccagagagcctgtgatactgggcactggggacctgactgcagccacccctgcaactgcagcgctggccacgggagctgtgatgccatcagcggcctgtgtctgtgtgaggctggctacgtgggcccgcggtgcgagcagcagtgtccccagggccactttgggcccggctgtgagcagcggtgccagtgtcagcatggagcagcctgtgaccacgtcagcggggcctgcacctgcccggccggctggaggggcaccttctgcgagcatgcctgcccggccggcttctttggattggactgtcgcagtgcctgcaactgcaccgccggagctgcctgtgatgccgtgaatggctcctgcctctgccccgctggccgccggggcccccgctgtgccgagacctgcccagcccacacctacgggcacaattgcagccaggcctgtgcctgctttaacggggcctcctgtgaccctgtccacgggcagtgccactgtgcccctggctggatggggccctcctgcctgcaggcctgccctgccggcctgtacggcgacaactgtcggcattcctgcctctgccagaacggagggacctgtgaccctgtctcaggccactgtgcgtgcccagagggctgggccggcctggcctgtgagaaggagtgcctcccccgggacgtcagagctggctgccggcacagcggcggttgcctcaacgggggcctgtgtgacccgcacacgggccgctgcctctgcccagccggctggactggggacaagtgtcagagcccctgcctgcggggctggtttggagaggcctgtgcccagcgctgcagctgcccgcctggcgctgcctgccaccacgtcactggggcctgccgctgtccccctggcttcactggctccggctgcgagcaggcctgcccacccggcagctttggggaggactgtgcgcagatgtgccagtgtcccggtgagaacccggcctgccaccctgccaccgggacctgctcatgtgctgctggctaccacggccccagctgccagcaacgatgtccgcccgggcggtatgggccaggctgtgaacagctgtgtgggtgtctcaacgggggctcctgtgatgcggccacgggggcctgccgctgccccactgggttcctcgggacggactgcaacctcacctgtccgcagggccgcttcggccccaactgcacccacgtgtgtgggtgtgggcagggggcggcctgcgaccctgtgaccggcacctgcctctgccccccggggagagccggcgtccgctgtgagcgaggctgcccccagaaccggtttggcgtgggctgcgagcacacctgctcctgcagaaatgggggcctgtgccacgccagcaacggcagctgctcctgtggcctgggctggacggggcggcactgcgagctggcctgtccccctgggcgctacggagccgcctgccatctggagtgctcctgccacaacaacagcacgtgtgagcctgccacgggcacctgccgctgcggccccggcttctatggccaggcctgcgagcacccctgtccccctggcttccacggggctggctgccaggggttgtgctggtgtcaacatggagccccctgcgaccccatcagtggccgatgcctctgccctgccggcttccacggccacttctgtgagagggggtgtgagccaggttcatttggagagggctgccaccagcgctgtgactgtgacgggggggcaccctgtgaccctgtcaccggtctctgcctttgcccaccagggcgctcaggagccacctgtaacctggattgcagaaggggccagtttgggcccagctgcaccctgcactgtgactgcgggggtggggctgactgcgaccctgtcagtgggcagtgtcactgtgtggatggctacatggggcccacgtgccgggaaggtgggcccctccggctccccgagaacccgtccttagcccagggctcagcgggcacactgcccgcctccagcagacccacatcccggagcggtggaccagcgaggcactag

SEQ ID NO: 20 - DNA, 663 bp, Homo sapiens
atgcctttaaccggcgtggggccgggcagctgcaggaggcagatcatccgggctctgtgcctcttgctacttctcctccacgccggctctgccaagaatatctggaaacgggcattgcctgcgaggctggccgagaaatcccgtgccgaggaggcgggcgcgcccggcggcccccggcagccccgagcagaccgctgcccgccgcctccgcggacgctgccccccggcgcctgccaggccgcgcgctgtcaggcggactccgagtgcccgcggcaccggcgctgctgctacaacggatgcgcctacgcctgcctagaagctgtgccgcccccgccagtcttagactggctggtgcagccgaaacctcgatggcttggtggcaatggctggctcctggatggccctgaggaggtgttacaagcagaggcgtgcagcaccacggaggatggggccgaacccctgctctgtccctcgggctatgagtgccacatcctgagcccaggtgacgtggccgaaggtatccccaaccgtgggcagtgcgtcaagcagcgccggcaagcagatgggcgaatcctacgacacaaactttacaaagaatatccagaaggtgactcaaagaatgtggcagaacctggaaggggacaacagaagcactttcagtaa

SEQ ID NO: 21 - DNA, 3093 bp, Homo sapiens
atgaggtcagaagccttgctgctatatttcacactgctacactttgctggggctggtttcccagaagattctgagccaatcagtatttcgcatggcaactatacaaaacagtatccggtgtttgtgggccacaagccaggacggaacaccacacagaggcacaggctggacatccagatgattatgatcatgaacggaaccctctacattgctgctagggaccatatttatactgttgatatagacacatcacacacggaagaaatttattgtagcaaaaaactgacatggaaatctagacaggccgatgtagacacatgcagaatgaagggaaaacataaggatgagtgccacaactttattaaagttcttctaaagaaaaacgatgatgcattgtttgtctgtggaactaatgccttcaacccttcctgcagaaactataagatggatacattggaaccattcggggatgaattcagcggaatggccagatgcccatatgatgccaaacatgccaacgttgcactgtttgcagatggaaaactatactcagccacagtgactgacttccttgccattgacgcagtcatttaccggagtcttggagaaagccctaccctgcggaccgtcaagcacgattcaaaatggttgaaagaaccatactttgttcaagccgtggattacggagattatatctacttcttcttcagggaaatagcagtggagtataacaccatgggaaaggtagttttcccaagagtggctcaggtttgtaagaatgatatgggaggatctcaaagagtcctggagaaacagtggacgtcgttcctgaaggcgcgcttgaactgctcagttcctggagactctcatttttatttcaacattctccaggcagttacagatgtgattcgtatcaacgggcgtgatgttgtcctggcaacgttttctacaccttataacagcatccctgggtctgcagtctgtgcctatgacatgcttgacattgccagtgtttttactgggagattcaaggaacagaagtctcctgattccacctggacaccagttcctgatgaacgagttcctaagcccaggccaggttgctgtgctggctcatcctccttagaaagatatgcaacctccaatgagttccctgatgataccctgaacttcatcaagacgcacccgctcatggatgaggcagtgccctccatcttcaacaggccatggttcctgagaacaatggtcagataccgccttaccaaaattgcagtggacacagctgctgggccatatcagaatcacactgtggtttttctgggatcagagaagggaatcatcttgaagtttttggccagaataggaaatagtggttttctaaatgacagccttttcctggaggagatgagtgtttacaactctgaaaaatgcagctatgatggagtcgaagacaaaaggatcatgggcatgcagctggacagagcaagcagctctctgtatgttgcgttctctacctgtgtgataaaggttccccttggccggtgtgaacgacatgggaagtgtaaaaaaacctgtattgcctccagagacccatattgtggatggataaaggaaggtggtgcctgcagccatttatcacccaacagcagactgacttttgagcaggacatagagcgtggcaatacagatggtctgggggactgtcacaattcctttgtggcactgaatgggcattccagttccctcttgcccagcacaaccacatcagattcgacggctcaagaggggtatgagtctaggggaggaatgctggactggaagcatctgcttgactcacctgacagcacagaccctttgggggcagtgtcttcccataatcaccaagacaagaagggagtgattcgggaaagttacctcaaaggccacgaccagctggttcccgtcaccctcttggccattgcagtcatcctggctttcgtcatgggggccgtcttctcgggcatcaccgtctactgcgtctgtgatcatcggcgcaaagacgtggctgtggtgcagcgcaaggagaaggagctcacccactcgcgccggggctccatgagcagcgtcaccaagctcagcggcctctttggggacactcaatccaaagacccaaagccggaggccatcctcacgccactcatgcacaacggcaagctcgccactcccggcaacacggccaagatgctcattaaagcagaccagcaccacctggacctgacggccctccccaccccagagtcaaccccaacgctgcagcagaagcggaagcccagccgcggcagccgcgagtgggagaggaaccagaacctcatcaatgcctgcacaaaggacatgccccccatgggctcccctgtgattcccacggacctgcccctgcgggcctcccccagccacatccccagcgtggtggtcctgcccatcacgcagcagggctaccagcatgagtacgtggaccagcccaaaatgagcgaggtggcccagatggcgctggaggaccaggccgccacactggagtataagaccatcaaggaacatctcagcagcaagagtcccaaccatggggtgaaccttgtggagaacctggacagcctgccccccaaagttccacagcgggaggcctccctgggtcccccgggagcctccctgtctcagaccggtctaagcaagcggctggaaatgcaccactcctcttcctacggggttgactataagaggagctaccccacgaactcgctcacgagaagccaccaggccaccactctcaaaagaaacaacactaactcctccaattcctctcacctctccagaaaccagagctttggcaggggagacaacccgccgcccgccccgcagagggtggactccatccaggtgcacagctcccagccatctggccaggccgtgactgtctcgaggcagcccagcctcaacgcctacaactcactgacaaggtcggggctgaagcgtacgccctcgctaaagccggacgtaccccccaaaccatcctttgctcccctttccacatccatgaagcccaatgatgcgtgtacataa

SEQ ID NO: 22 - DNA, 2409 bp, Homo sapiens
atggactgtgggccacctgctaccctccagccccacctgactgggccacctggcactgcccaccaccctgtagcagtgtgccagcaggagagtctgtcctttgcagagctgcccgccctgaagcccccgagcccagtgtgtctggaccttttccctgttgccccagaggagcttcgggctcctggcagccgctggtccctggggacccctgcccctctccaagggttgctatggccattatccccaggaggctcagatacagagatcaccagcggggggatgcggcccagcagggctggcagctggccacactgtcctggtgcccagcccccagctctggagggaccctggagtccccgacacacacagccacagcgccgggccagccacggctcggagaagaagtctgcctggcgcaagatgcgggtgtaccagcgtgaagaggtccccggctgccccgaggcccacgctgtcttcctagagcctggccaggtagtgcaagagcaggccctgagcacagaggagcccagggtggagttgtctgggtccacccgagtgagcctcgaaggtcctgagcggaggcgcttctcggcatcggagctgatgacccggctgcactcttctctgcgcctggggcggaattcagcagcccgggcactcatctctgggtcaggcaccggagcagcccgggaagggaaagcatctggaatggaggctcgaagtgtagagatgagcggggaccgggtgtcgcggccagcccctggtgactcacgagagggcgattggtccgagcccaggctagacacacaggaagagccgcctttggggtccaggagcaccaacgagcggcgccagtctcgattcctccttaactccgtcctctatcaggaatacagcgacgtggccagcgcccgcgaactgcggcggcagcagcgcgaggaggagggcccgggggacgaggccgagggcgcagaggaggggccggggccgccgcgggccaacctctcccccagcagctccttccgggcgcagcgctcggcgcgaggctccaccttctcgctgtggcaggatatccccgacgtacgcggcagcggcgtcctggccacgctgagcctgcgggactgcaagctgcaggaggccaagtttgagctgatcacctccgaggcctcctacatccacagcctgtcggtggctgtgggccacttcttaggctctgccgagctgagcgagtgtctgggggcgcaggacaagcagtggctgttttccaaactgcccgaggtcaagagcaccagcgagaggttcctgcaggacctggagcagcggctggaggcagatgtgctgcgcttcagcgtgtgcgacgtggtgctggaccactgcccggccttccgcagagtctacctgccctatgtcaccaaccaggcctaccaggagcgcacctaccagcgcctgctcctggagaaccccaggttccctggcatcctggctcgcctggaggagtctcctgtgtgccagcgtctgccccttacctccttccttatcctgcccttccagaggatcacccgcctcaagatgttggtggagaacatcctgaagcggacagcacagggctctgaagacgaagacatggccaccaaggccttcaatgcgctcaaggagctggtgcaggagtgcaatgctagtgtacagtccatgaagaggacagaggaactcatccacctgagcaagaagatccactttgagggcaagattttcccgctgatctctcaggcccgctggctggttcggcatggagagttggtagagctggcaccactgcctgcagcaccccctgccaagctgaagctgtccagcaaggcagtctacctccacctcttcaatgactgcttgctgctctctcggcggaaggagctagggaagtttgccgttttcgtccatgccaagatggctgagctgcaggtgcgggacctgagcctgaagctgcagggcatccccggccacgtgttcctcctccagctcctccacgggcagcacatgaagcaccagttcctgctgcgggcccggacggaaagtgagaagcagcgatggatctcagccttgtgcccctccagcccccaggaggacaaggaggtcatcagtgagggggaagattgcccccaggttcagtgtgttaggacatacaaggcactgcacccagatgagctgaccttggagaagactgacatcctgtcagtgaggacctggaccagtgacggctggctggaaggggtccgcctggcagatggtgagaaggggtgggtgccccaggcctatgtggaagagatcagcagcctcagcgcccgcctccgaaacctccgggagaataagcgagtcacaagtgccaccagcaaactgggggaggctcctgtgtga

SEQ ID NO: 23 - DNA, 1404 bp, Homo sapiens
atgcagttctttggccgcctggtcaataccttcagtggcgtcaccaacttgttctctaacccattccgggtgaaggaggtggctgtggccgactacacctcgagtgaccgagttcgggaggaagggcagctgattctgttccagaacactcccaaccgcacctgggactgcgtcctggtcaaccccaggaactcacagagtggattccgactcttccagctggagttggaggctgacgccctagtgaatttccatcagtattcttcccagctgctacccttctatgagagctcccctcaggtcctgcacactgaggtcctgcagcacctgaccgacctcatccgtaaccaccccagctggtcagtggcccacctggctgtggagctagggatccgcgagtgcttccatcacagccgtatcatcagctgtgccaattgcgcggagaacgaggagggctgcacacccctgcacctggcctgccgcaagggtgatggggagatcctggtggagctggtgcagtactgccacactcagatggatgtcaccgactacaagggagagaccgtcttccattatgctgtccagggtgacaattctcaggtgctgcagctccttggaaggaacgcagtggctggcctgaaccaggtgaataaccaagggctgaccccgctgcacctggcctgccagctggggaagcaggagatggtccgcgtgctgctgctgtgcaatgctcggtgcaacatcatgggccccaacggctaccccatccactcggccatgaagttctctcagaaggggtgtgcggagatgatcatcagcatggacagcagccagatccacagcaaagacccccgttacggagccagccccctccactgggccaagaacgcagagatggcccgcatgctgctgaaacggggctgcaacgtgaacagcaccagctccgcggggaacacggccctgcacgtggcggtgatgcgcaaccgcttcgactgtgccatagtgctgctgacccacggggccaacgcggatgcccgcggagagcacggcaacaccccgctgcacctggccatgtcgaaagacaacgtggagatgatcaaggccctcatcgtgttcggagcagaagtggacaccccgaatgactttggggagactcctacattcctagcctccaaaatcggcagacttgtcaccaggaaggcgatcttgactctgctgagaaccgtgggggccgaatactgcttcccacccatccacggggtccccgcggagcagggctctgcagcgccacatcatcccttctccctggaaagagctcagcccccaccgatcagcctaaacaacctaggcagtcacccaagccaggccggatggtgggcctggggtgcggcgtcagatgggtaa

SEQ ID NO: 24 - DNA, 3585 bp, Homo sapiens
atggccaaaccttatgaatttaactggcagaaggaagttccctcctttttgcaagaaggagcagtttttgacagatacgaggaggaatcctttgtgtttgaacccaactgcctcttcaaagtggatgagtttggcttctttctgacatggagaagtgaaggcaaggaaggacaggtgctagaatgctccctcatcaacagtattcggtcgggagccataccaaaggatcccaaaatcttggctgctcttgaagctgttggaaaatcagaaaatgatctggaagggcggatagtttgtgtctgcagtggcacagatctagtgaacattagttttacctacatggtggctgaaaatccagaagtaactaagcaatgggtagaaggcctgagatcaatcatacacaacttcagggccaacaacgtcagtccaatgacatgcctcaagaaacactggatgaaattggcatttatgaccaacacaaatggtaaaattccagttaggagtattactagaacatttgcatcgggaaaaacagaaaaggtgatctttcaagcactcaaggagttaggtcttcccagtggaaagaatgatgaaattgagcccacagcattttcttatgaaaagttctatgaactgacacaaaagatttgtcctcggacagatatagaagatcttttcaaaaaaatcaatggagacaaaactgattatttaacggtagaccaattagtgagctttctaaatgaacatcaacgagatcctcgattgaatgaaattttatttccattttatgatgccaaaagggcaatgcagatcattgagatgtatgaacctgatgaagatttgaagaaaaaaggccttatatcaagtgatgggttttgcagatatctgatgtcagatgaaaacgccccagtcttcctagatcgtttagaactttaccaagaaatggaccatcctctggctcactacttcatcagttcttcccataacacttatctcactggcagacagttcggcgggaagtcttcggtagaaatgtacagacaggttctcctggctggttgcagatgtgttgaacttgactgctgggatggaaaaggtgaagaccaagaaccaataataactcatggaaaagcaatgtgtacagatatcctttttaaggatgtaattcaagccatcaaggaaactgcatttgtcacatcagaatatcctgtaattctctcctttgaaaatcactgcagcaaatatcaacagtacaagatgtccaaatattgcgaagatctatttggggatctcctgttgaaacaagcacttgaatcacatccacttgaaccaggcagggctttgccatcccccaatgacctcaaaagaaaaatactcataaaaaacaagcggctgaaacctgaagttgaaaaaaaacagctggaagctttgagaagcatgatggaagctggagaatctgcctccccagcaaacatcttagaggacgataatgaagaggagatcgaaagtgctgaccaagaggaggaagctcaccccgaattcaaatttggaaatgaactttctgctgatgacttgggtcacaaggaagctgttgcaaatagcgtcaagaagggcctggtcactgtagaagatgagcaggcgtggatggcatcttataaatatgtaggtgctaccactaatatccatccatatttgtccacaatgatcaactacgcccagcctgtaaagtttcaaggtttccatgtggcagaagaacgcaatattcattataacatgtcttcttttaatgaatcagtcggtcttggctacttgaagacacatgcaattgaatttgtcaattataacaaacggcaaatgagtcgcatttaccccaagggaggccgagtcgattccagtaattacatgcctcagattttctggaacgctggctgccagatggtttcactgaactatcaaaccccagatttagcgatgcaattgaatcagggaaaatttgagtataatggatcgtgcgggtaccttctcaaaccagatttcatgaggcggcctgatcgaacatttgaccccttctctgaaactcctgttgatggtgttattgcagccacttgctcagtgcaggttatatcaggtcaattcttatcagataagaaaattggcacctacgtagaggtggatatgtatgggttgcccactgacaccatacgtaaggaattccgaactcgcatggttatgaataatggactcaatccagtttacaatgaagagtcatttgtatttcggaaggtgatcctgccggacctggctgtcttgagaatagctgtgtatgatgataacaacaagctgattggccagaggatcctcccgcttgatggcctccaagccggatatcgacacatttcccttcgaaatgagggaaataaaccattatcactaccaacaattttctgcaatattgttcttaaaacatatgtgcctgatggatttggagatatcgtggatgctttatcagatccaaagaaatttctctcaattacagaaaagagagcagaccaaatgagagctatgggcattgaaactagtgacatagccgacgtgcccagtgacacttccaaaaatgacaagaaaggaaaggccaacaccgccaaagcaaatgtgacccctcagagtagctctgagctcagaccaaccaccacggctgccctggcctctggtgtggaagccaagaaaggtattgaacttatccctcaagtaaggatagaagacttaaagcagatgaaggcttacttgaagcatttaaagaaacagcagaaggagctaaattctttaaagaagaaacatgcaaaggaacacagtaccatgcagaagttacactgcacgcaagttgacaaaattgtggcacagtatgacaaagagaagtcgactcatgagaaaatcctagagaaggcaatgaagaagaaggggggaagtaattgtctcgaaatgaaaaaagaaacagaaatcaaaattcagacgctgacatcagatcacaaatctaaggtcaaagagattgtagcacagcacacaaaggaatggtcagaaatgatcaatacccacagtgctgaggagcaagaaatccgagacctgcacctcagccagcagtgtgagctgctgaaaaagctactcatcaatgcccacgagcagcaaacccagcagctgaaactgtcccatgacagggaaagcaaggaaatgcgagcacaccaggctaagatttctatggaaaatagcaaagccatcagccaagataaatctatcaagaataaagcagaacgggaaaggcgagtcagggagttaaacagcagcaacactaaaaagtttctggaagaaagaaagagacttgccatgaagcagtccaaagaaatggatcagttgaaaaaagtccagcttgaacatctagaattcctagagaaacagaatgagcagcttttgaaatcctgtcatgcagtgtcccaaacgcaaggcgaaggagatgcagcagatggtgaaattggaagccgagatggaccgcagaccagcaacagtagtatgaaactccaaaatgcaaactga

SEQ ID NO: 25 - DNA, 2469 bp, Homo sapiens
atgtggagctggaagtgcctcctcttctgggctgtgctggtcacagccacactctgcaccgctaggccgtccccgaccttgcctgaacaagcccagccctggggagcccctgtggaagtggagtccttcctggtccaccccggtgacctgctgcagcttcgctgtcggctgcgggacgatgtgcagagcatcaactggctgcgggacggggtgcagctggcggaaagcaaccgcacccgcatcacaggggaggaggtggaggtgcaggactccgtgcccgcagactccggcctctatgcttgcgtaaccagcagcccctcgggcagtgacaccacctacttctccgtcaatgtttcagatgctctcccctcctcggaggatgatgatgatgatgatgactcctcttcagaggagaaagaaacagataacaccaaaccaaaccgtatgcccgtagctccatattggacatccccagaaaagatggaaaagaaattgcatgcagtgccggctgccaagacagtgaagttcaaatgcccttccagtgggaccccaaaccccacactgcgctggttgaaaaatggcaaagaattcaaacctgaccacagaattggaggctacaaggtccgttatgccacctggagcatcataatggactctgtggtgccctctgacaagggcaactacacctgcattgtggagaatgagtacggcagcatcaaccacacataccagctggatgtcgtggagcggtcccctcaccggcccatcctgcaagcagggttgcccgccaacaaaacagtggccctgggtagcaacgtggagttcatgtgtaaggtgtacagtgacccgcagccgcacatccagtggctaaagcacatcgaggtgaatgggagcaagattggcccagacaacctgccttatgtccagatcttgaagactgctggagttaataccaccgacaaagagatggaggtgcttcacttaagaaatgtctcctttgaggacgcaggggagtatacgtgcttggcgggtaactctatcggactctcccatcactctgcatggttgaccgttctggaagccctggaagagaggccggcagtgatgacctcgcccctgtacctggagatcatcatctattgcacaggggccttcctcatctcctgcatggtggggtcggtcatcgtctacaagatgaagagtggtaccaagaagagtgacttccacagccagatggctgtgcacaagctggccaagagcatccctctgcgcagacaggtaacagtgtctgctgactccagtgcatccatgaactctggggttcttctggttcggccatcacggctctcctccagtgggactcccatgctagcaggggtctctgagtatgagcttcccgaagaccctcgctgggagctgcctcgggacagactggtcttaggcaaacccctgggagagggctgctttgggcaggtggtgttggcagaggctatcgggctggacaaggacaaacccaaccgtgtgaccaaagtggctgtgaagatgttgaagtcggacgcaacagagaaagacttgtcagacctgatctcagaaatggagatgatgaagatgatcgggaagcataagaatatcatcaacctgctgggggcctgcacgcaggatggtcccttgtatgtcatcgtggagtatgcctccaagggcaacctgcgggagtacctgcaggcccggaggcccccagggctggaatactgctacaaccccagccacaacccagaggagcagctctcctccaaggacctggtgtcctgcgcctaccaggtggcccgaggcatggagtatctggcctccaagaagtgcatacaccgagacctggcagccaggaatgtcctggtgacagaggacaatgtgatgaagatagcagactttggcctcgcacgggacattcaccacatcgactactataaaaagacaaccaacggccgactgcctgtgaagtggatggcacccgaggcattatttgaccggatctacacccaccagagtgatgtgtggtctttcggggtgctcctgtgggagatcttcactctgggcggctccccataccccggtgtgcctgtggaggaacttttcaagctgctgaaggagggtcaccgcatggacaagcccagtaactgcaccaacgagctgtacatgatgatgcgggactgctggcatgcagtgccctcacagagacccaccttcaagcagctggtggaagacctggaccgcatcgtggccttgacctccaaccaggagtacctggacctgtccatgcccctggaccagtactcccccagctttcccgacacccggagctctacgtgctcctcaggggaggattccgtcttctctcatgagccgctgcccgaggagccctgcctgccccgacacccagcccagcttgccaatggcggactcaaacgccgctga

SEQ ID NO: 26 - DNA, 1530 bp, Homo sapiens
atgaatctcctggaccccttcatgaagatgaccgacgagcaggagaagggcctgtccggcgcccccagccccaccatgtccgaggactccgcgggctcgccctgcccgtcgggctccggctcggacaccgagaacacgcggccccaggagaacacgttccccaagggcgagcccgatctgaagaaggagagcgaggaggacaagttccccgtgtgcatccgcgaggcggtcagccaggtgctcaaaggctacgactggacgctggtgcccatgccggtgcgcgtcaacggctccagcaagaacaagccgcacgtcaagcggcccatgaacgccttcatggtgtgggcgcaggcggcgcgcaggaagctcgcggaccagtacccgcacttgcacaacgccgagctcagcaagacgctgggcaagctctggagacttctgaacgagagcgagaagcggcccttcgtggaggaggcggagcggctgcgcgtgcagcacaagaaggaccacccggattacaagtaccagccgcggcggaggaagtcggtgaagaacgggcaggcggaggcagaggaggccacggagcagacgcacatctcccccaacgccatcttcaaggcgctgcaggccgactcgccacactcctcctccggcatgagcgaggtgcactcccccggcgagcactcggggcaatcccagggcccaccgaccccacccaccacccccaaaaccgacgtgcagccgggcaaggctgacctgaagcgagaggggcgccccttgccagaggggggcagacagccccctatcgacttccgcgacgtggacatcggcgagctgagcagcgacgtcatctccaacatcgagaccttcgatgtcaacgagtttgaccagtacctgccgcccaacggccacccgggggtgccggccacgcacggccaggtcacctacacgggcagctacggcatcagcagcaccgcggccaccccggcgagcgcgggccacgtgtggatgtccaagcagcaggcgccgccgccacccccgcagcagcccccacaggccccgccggccccgcaggcgcccccgcagccgcaggcggcgcccccacagcagccggcggcacccccgcagcagccacaggcgcacacgctgaccacgctgagcagcgagccgggccagtcccagcgaacgcacatcaagacggagcagctgagccccagccactacagcgagcagcagcagcactcgccccaacagatcgcctacagccccttcaacctcccacactacagcccctcctacccgcccatcacccgctcacagtacgactacaccgaccaccagaactccagctcctactacagccacgcggcaggccagggcaccggcctctactccaccttcacctacatgaaccccgctcagcgccccatgtacacccccatcgccgacacctctggggtcccttccatcccgcagacccacagcccccagcactgggaacaacccgtctacacacagctcactcgaccttga

SEQ ID NO: 27 - DNA, 4149 bp, Homo sapiens
atggatgaagaagagaaccactatgtctcgcagctcagggaagtctacagcagctgcgacaccacggggactggctttctggaccgccaggagctgacccagctctgccttaagcttcacctggagcagcagctgcccgtcctcctgcagacgcttctcggaaacgaccatttcgccagggttaactttgaggaatttaaggaaggttttgtggctgtgttgtcttcaaatgctggtgttcgcccctcagatgaagacagtagttctttggaatcagctgcctccagtgccatccctccaaagtatgtgaatggttctaagtggtatggccgtcggagccggcctgagctatgtgacgctgccacagaagccagacgcgtgccggagcagcaaacccaggccagcctgaaaagtcacctctggcgctcagcgtctctggagagcgtggagagtcccaagtcagatgaagaggccgagagcactaaagaagctcagaatgaattatttgaagcacaaggacagctgcagacctgggattctgaggactttgggagcccccagaagtcctgcagcccctcctttgacaccccagagagccagatccggggcgtgtgggaagagctgggggtgggcagcagcggacacctgagcgagcaggagctggctgtggtctgccagagcgtcgggctccagggactcgagaaagaggaactcgaagacctgtttaacaaactggatcaagacggagacggcaaagtgagtcttgaggaattccagcttggcctcttcagtcatgagcccgcgctacttctagagtcttccactcgggttaaaccgagcaaggcttggtctcattaccaggtcccagaggagagcggctgccacaccaccacaacctcatccctcgtgtccctgtgctccagcctgcgcctcttctccagcattgacgatggttctggcttcgcttttcctgatcaggtcctggccatgtggacccaggaggggattcagaatggcagggagatcttgcagagcctggacttcagcgtggacgagaaggtgaaccttctggagctgacctgggcccttgacaacgagctcatgacagtggacagtgccgtccagcaggcagccctggcctgctaccaccaggagctgagctaccagcaagggcaggtggagcagctggcaagggagcgtgacaaggcaaggcaggacctggagagggccgagaagaggaacctggagtttgtgaaagagatggacgactgccactccaccctggagcagctcacggagaagaaaatcaagcatctggagcaggggtaccgggaaaggctgagcctcctgcggtctgaggtggaggcggagcgagagctgttctgggagcaggcccacaggcagagggccgcgctggagtgggacgtggggcgcctgcaggctgaggaggctggcctccgcgagaagctgaccctggccctgaaggaaaacagtcgcctacagaaggagattgtggaagtggtggaaaagctttcggattcggagaggctggccctgaagctgcagaaggacctggagtttgtgctgaaggacaagctggagccacagagtgcagagctcctggcccaggaggagcggttcgcagcagtcctgaaggaatacgagctcaagtgccgggacctgcaggaccgcaacgatgagctgcaagctgagctggaaggcctgtgggcgcggctgcccaagaaccggcacagcccctcatggagcccggatgggcgcagacggcagctccctggactcggcccagcaggcatttcattcctgggtaattctgctccagtgagtatagaaacggagctgatgatggagcaggtaaaggagcattaccaagacctcaggacccagctggagaccaaggtaaattactacgaaagggaaattgcggcactgaaaaggaactttgagaaggagaggaaggacatggagcaggctcgcaggcgcgaggtcagcgtgctggagggtcagaaggccgacctggaggagctccacgagaagtctcaggaggtcatctggggcctgcaggagcagctgcaggacacagcccgcggccccgagcctgagcagatgggcctggcaccctgctgcacccaggcactgtgtggcctggccctgcggcatcacagccacctgcagcagatcaggagagaggctgaggcggagctgagtggagagctgtcggggctgggagccctgcccgctcgcagagacctgaccttggagctggaggagccgccgcagggacccctgccacgcgggagccagaggtcggagcagctggagctggagagggcactgaagctgcagccctgtgcgagcgagaagcgcgcccagatgtgcgtatcgttggccctcgaggaggaggagttggagcttgcccgcgggaagcgagtggacgggccctccctggaagcagagatgcaggccctgccgaaagatgggctggtggcaggaagtggccaggagggcacacgtggcctcctaccactgcgtccgggctgtggggagcggccactggcctggctggccccaggtgatggcagagagtctgaggaggcggcaggagccgggcctcgccgcaggcaagcccaggacacagaagctacgcagagcccggcccccgcccctgccccggcatcccacggcccctcagagaggtggtcacgcatgcagccctgtggagtggatggggatattgtcccaaaggagccagagcctttcggcgcgagcgcagcggggctggagcagcctggagcccgggagctgcctctgctgggaacagagagagacgcctcgcaaacccagccacggatgtgggagccacccctgaggccggccgcttcgtgcaggggacaggctgagaggctacaggccattcaggaagagcgagcacgaagctggagcaggggcacccaggagcaggcctcggagcagcaggcccgggccgagggcgccctggagcctgggtgtcacaagcacagtgtggaggttgccaggagagggtccttgccatcccacctccagctcgcagacccgcagggttcctggcaggagcagcttgctgccccagaagagggggagaccaaaatagcgctggagagagagaaggatgacatggaaaccaaacttctacatctggaagacgtcgtccgggctctggagaaacatgtagatttgagagagaacgacagactggagttccatagactttctgaagaaaacactttgttgaaaaacgatctgggaagggttcggcaagagcttgaagctgcagaaagtactcacgatgcacagaggaaggaaattgaggttttaaagaaagacaaggaaaaggcctgctctgagatggaggtgctcaacagacagaatcagaactacaaggatcaattatcccagctcaatgtcagggttcttcaactgggacaggaggcttctacccaccaggcccaaaacgaggagcatcgtgtgaccattcagatgttaacacagagcctggaggaggtggttcgcagtgggcagcagcagagtgaccaaatccaaaaacttagagttgaacttgaatgcctgaatcaggaacatcagagcctgcagctgccatggtcagagctgacccagacccttgaggaaagtcaagaccaggtgcagggagctcacctgaggctgaggcaggcccaggcccagcacttgcaggaggtccggctggtgccccaggaccgtgtggccgagctgcatcgcctgctcagccttcagggagagcaggccaggaggcgcctggatgcacagcgggaagaacatgagaaacagctgaaagccacagaagagcgggtggaagaggcggagatgattctgaagaatatggaaatgctcctccaagagaaagtggataagctgaaggagcagtttgaaaagaacacgaagtccgacctgctgctgaaggagctgtacgtggagaacgcccacctggtgagagcacttcaggccaccgaggagaagcagcgaggcgccgagaaacaaagccgcctcttggaagaaaaagttcgcgctctcaacaaactcgtcagtaggattgcccccgcagccctctctgtgtaa

SEQ ID NO: 28 - DNA, 2424 bp, Homo sapiens
atgatggactccccgttcctggagctgtggcagtccaaggcagtgtccatcagggagcagctgggactcggggaccggcccaacgactcctattgctacaactcggccaaaaacagcaccgtgctccagggggtcacctttggtggcatccccactgtcctgctcatagacgtcagctgcttcctgttcttaatcttggtgttttctattataagaagaagattctgggactatggccgcattgccctggtgtcagaagcagacagcgagtccagatttcagagattgtcatcgacttcctcctcaggtcaacaagactttgaaaatgagctgggatgctgtccctggctgactgccatcttccgtctgcatgatgaccagatcctggaatggtgtggggaggacgccatccactacctgtccttccagaggcacatcatcttcctgttggtggtggtcagctttttgtccctgtgtgtcatcctgcctgtcaacctctcaggggacttgctggacaaagacccgtatagttttgggaggacaacaatagcaaacctacagactgacaatgacctcctttggctgcacaccatctttgctgtcatttacctcttcctcactgtgggtttcatgcggcaccacactcagtccattaagtacaaagaggagaacctggtgaggcggaccctgttcatcacaggactccccagagatgccaggaaggagactgtggagagccacttccgggacgcgtatcccacgtgtgaggtggttgatgtgcagctgtgctacaacgtggccaaactgatctacctgtgcaaggagaaaaagaagactgagaagagcctgacctattacacaaacctgcaggtgaagacaggccagcggaccctcatcaaccccaagccctgtggccagttttgctgctgtgaagtgctgggctgtgagtgggaagacgccatctcttactacacacggatgaaggacaggctgctggagaggatcacagaggaagaacgccacgtccaggaccagcccctgggaatggccttcgtcaccttccaggagaagtccatggccacctacatcctgaaagatttcaatgcctgcaagtgtcagagccttcagtgcaaaggtgagccccagccgtcctcccatagcagggagctctatacctccaagtggacagtcacctttgctgctgaccctgaggacatctgctggaagaacctctctatccagggcctccgctggtggctacagtggctgggcatcaacttcaccctcttcctggggctatttttcctgaccacaccctccatcatcctgtccaccatggacaagtttaatgtcaccaaacccatccatgcgctgaataacccgatcatcagccagttcttccccaccctcctgctctggtccttctcggccctgctcccctccattgtctactactctacactgctggagtctcactggaccaagtcgggggaaaaccagatcatgatgaccaaagtctacatattcttgatcttcatggtgctgatcctgccctccctgggtctcaccagtctagattttttcttccggtggctctttgacaaaacttcctcggaggcctccatcaggttggagtgcgtcttcctgcctgaccagggtgccttctttgtgaactatgtcatcgcctcggccttcatcggcaatggcatggagctgctgcggctgccaggtctcatcctctataccttccgcatgatcatggccaagacggctgctgaccgcaggaatgtcaagcagaaccaggccttccagtacgagtttggagccatgtatgcatggatgctgtgtgtcttcactgtcatcgtggcctacagcatcacttgtcccatcatcgcgccatttggcctcatctacatcctgctcaagcacatggtggaccggcacaacctctacttcgtctacctcccagccaagctggagaaggggatccactttgccgctgtgaaccaggccttggcagcccccatcctgtgcctcttctggctctacttcttttccttcctgcgcctgggtatgaaggcccccgccactctgttcaccttcctggtgctgctgctcaccatcctggtctgcctggctcacacctgctttggatgcttcaagcacctcagccctctgaactacaaaacagaagagcctgcaagtgacaaaggaagtgaggcagaggcccacatgcccccaccgttcacaccctacgtgcctcggattctgaacggcttggcctcggagaggacagcactgtctccgcagcagcagcagcagcagacctatggtgccatccacaacatcagcgggactatccctggacagtgcttggcgcagagcgccacgggcagtgtggctgctgccccccaggaggcctga

SEQ ID NO: 29 - DNA, 2667 bp, Homo sapiens
atggatgaatcagccttgttggatcttttggagtgtccggtgtgtctagagcgccttgatgcttctgcgaaggtcttgccttgccagcatacgttttgcaagcgatgtttgctggggatcgtaggttctcgaaatgaactcagatgtcccgagtgcaggactcttgttggctcgggtgtcgaggagcttcccagtaacatcttgctggtcagacttctggatggcatcaaacagaggccttggaaacctggtcctggtgggggaagtgggaccaactgcacaaatgcattaaggtctcagagcagcactgtggctaattgtagctcaaaagatctgcagagctcccagggcggacagcagcctcgggtgcaatcctggagccccccagtgaggggtatacctcagttaccatgtgccaaagcattatacaactatgaaggaaaagagcctggagaccttaaattcagcaaaggtgacatcatcattttgcgaagacaagtggatgaaaattggtaccatggggaagtcaatggaatccatggctttttccccaccaactttgtgcagattattaaaccgttacctcagcccccacctcagtgcaaagcactttatgactttgaagtgaaagacaaggaagcagacaaagattgccttccatttgcaaaggatgatgttctgactgtgatccgaagagtggatgaaaactgggctgaaggaatgctggcagacaaaataggaatatttccaatttcatatgttgagtttaactcggctgctaagcagctgatagaatgggataagcctcctgtgccaggagttgatgctggagaatgttcctcggcagcagcccagagcagcactgccccaaagcactccgacaccaagaagaacaccaaaaagcggcactccttcacttccctcactatggccaacaagtcctcccaggcatcccagaaccgccactccatggagatcagcccccctgtcctcatcagctccagcaaccccactgctgctgcacggatcagcgagctgtctgggctctcctgcagtgccccttctcaggttcatataagtaccaccgggttaattgtgaccccgcccccaagcagcccagtgacaactggcccctcgtttactttcccatcagatgttccctaccaagctgcccttggaactttgaatcctcctcttccaccaccccctctcctggctgccactgtccttgcctccacaccaccaggcgccaccgccgctgctgctgctgctggaatgggaccgaggcccatggcaggatccactgaccagattgcacatttacggccgcagactcgccccagtgtgtatgttgctatatatccatacactcctcggaaagaggatgaactagagctgagaaaaggggagatgtttttagtgtttgagcgctgccaggatggctggttcaaagggacatccatgcataccagcaagataggggttttccctggcaattatgtggcaccagtcacaagggcggtgacaaatgcttcccaagctaaagtccctatgtctacagctggccagacaagtcggggagtgaccatggtcagtccttccacggcaggagggcctgcccagaagctccagggaaatggcgtggctgggagtcccagtgttgtccccgcagctgtggtatcagcagctcacatccagacaagtcctcaggctaaggtcttgttgcacatgacggggcaaatgacagtcaaccaggcccgcaatgctgtgaggacagttgcagcgcacaaccaggaacgccccacggcagcagtgacacccatccaggtacagaatgccgccggcctcagccctgcatctgtgggcctgtcccatcactcgctggcctccccacaacctgcgcctctgatgccaggctcagccacgcacactgctgccatcagtatcagtcgagccagtgcccctctggcctgtgcagcagctgctccactgacttccccaagcatcaccagtgcttctctggaggctgagcccagtggccggatagtgaccgttctccctggactccccacatctcctgacagtgcttcatcagcttgtgggaacagttcagcaaccaaaccagacaaggatagcaaaaaagaaaaaaagggtttgttgaagttgctttctggcgcctccactaaacggaagccccgcgtgtctcctccagcatcgcccaccctagaagtggagctgggcagtgcagagcttcctctccagggagcggtggggcccgaactgccaccaggaggtggccatggcagggcaggctcctgccctgtggacggggacggaccggtcacgactgcagtggcaggagcagccctggcccaggatgcttttcataggaaggcaagttccctggactccgcagttcccatcgctccacctcctcgccaggcctgttcctccctgggtcctgtcttgaatgagtctagacctgtcgtttgtgaaaggcacagggtggtggtttcctatcctcctcagagtgaggcagaacttgaacttaaagaaggagatattgtgtttgttcataaaaaacgagaggatggctggttcaaaggcacattacaacgtaatgggaaaactggccttttcccaggaagctttgtggaaaacatatga

SEQ ID NO: 30 - DNA, 1797 bp, Homo sapiens
atggacgctctgccccgcagcgggctgaacctgaaggaggagccgctgctgcccgccggcctgggctcagtgcgctcctggatgcagggcgcgggcatcctggacgccagcaccgcggcgcagagtggcgtgggtctggcacgagcacattttgagaagcagcctccctccaacctcaggaaatccaacttcttccacttcgtgctggccatgtacgaccggcaggggcagcccgtggaggtggagcgcacagccttcatcgacttcgtggaaaaggaccgagagcccggggcggaaaagactaacaatgggatccattaccgcctccggctggtgtataacaatggactgcggacagagcaagacctctacgtgcgtctcatcgactccatgtccaaacaggccatcatctatgaggggcaggacaagaaccccgaaatgtgccgagtgctgctcacccatgagatcatgtgcagccggtgctgtgaccggaagagctgtggcaaccggaatgagacgccctcagaccccgtcatcattgacaggttcttcctcaagttcttcctcaaatgcaaccagaactgcctgaagaatgcggggaatcccagagacatgcgccgcttccaggtggtggtgtccacgacggtgagcgtggacggacacgtgctggccgtgtccgacaacatgtttgtgcacaacaactccaagcatggccgcagggcgcgccgcctggacccctccgaagctgccaccccctgcatcaaggccatcagccccggggagggctggaccacgggcggcgccaccgtcattgtcatcggcgacaacttcttcgacgggttgcaggtcgtgttcggaaacgtgctcgtgtggagcgagctcatcacgccccacgccatccgggtgcagacgcccccgcggcacatccccggggtggtggaggtgaccctctcctacaagtccaagcagttttgcaagggatgccccggccgctttgtctacacagctctgaacgagcccaccattgactacggattccagaggctacagaaagtcattcccagacaccccggagaccccgagaggctgcccaaggaagtgctgctgaagcgggcggccgacttggcagaagccctgtacggagtgcccggcagtaaccaggagctgctcctgaagcgcgcggcggacgtggccgaggctctgtacagcaccccccgcgcacccgggccgctcgcacccctggccccgagccacccacaccccgccgtcgtgggcatcaacgccttcagcagcccgctggccatcgccgtcggggacgccaccccggggcccgagccgggctacgcgcgcagctgcagcagcgcgtccccccgcgggttcgcgcccagccccggctcgcagcagagcggctacggcggcggcctcggagctggcctgggcggctacggcgcgccgggcgtggccggcctcggcgtgcctgggtcccccagcttcctcaatggctccaccgccacctcgcccttcgccatcatgccctctagccccccgctggcggctgcctcctccatgtccctcccggccgctgcccccaccaccagcgtgttctccttctcgcctgtcaacatgatctccgccgtcaaacagaggagcgccttcgcccccgtgctgcgccccccaagctccccaccccaggcctgccccagagcccacggagaggggcttccagaccagtcttttgaggattctgacaagtttcactctccagcccgggggcttcagggcctggcatactcctaa

SEQ ID NO: 31 - DNA, 651 bp, Homo sapiens
atgcggagcgggtgtgtggtggtccacgtatggatcctggccggcctctggctggccgtggccgggcgccccctcgccttctcggacgcggggccccacgtgcactacggctggggcgaccccatccgcctgcggcacctgtacacctccggcccccacgggctctccagctgcttcctgcgcatccgtgccgacggcgtcgtggactgcgcgcggggccagagcgcgcacagtttgctggagatcaaggcagtcgctctgcggaccgtggccatcaagggcgtgcacagcgtgcggtacctctgcatgggcgccgacggcaagatgcaggggctgcttcagtactcggaggaagactgtgctttcgaggaggagatccgcccagatggctacaatgtgtaccgatccgagaagcaccgcctcccggtctccctgagcagtgccaaacagcggcagctgtacaagaacagaggctttcttccactctctcatttcctgcccatgctgcccatggtcccagaggagcctgaggacctcaggggccacttggaatctgacatgttctcttcgcccctggagaccgacagcatggacccatttgggcttgtcaccggactggaggccgtgaggagtcccagctttgagaagtaa

SEQ ID NO: 32 - DNA, 5778 bp, Homo sapiens
atgtttaccttaaccggttgtagactggtggagaaaacccagaaggtggagaatccatcagtctcatttgcctcttctttcccccttattcctcttctcctaagaggcaagagtgttcagaagaaacaagcagagagtaaaagccagataaagctccatactcagagtgctccctttggactgtgtcccaaggacatgatgctcacccaggctccaagctccgtcgtgaggtccaggaacagcaggaaccacaccgtgaactctggtggatcctgcctgagtgccagcacagtggccatccctgccatcaacgacagcagtgcagccatgagtgcctgcagcaccatcagcgcccagcccgcaagctccatggacactcagatgcactccccaaagaagcaggagagagtgaacaagagggtcatctggggcattgaggtggctgaggagctgcattggaaaggctgggagctaggaaaggagaccacaaggaatctggttctgaaaaatcgatccttgaaactccagaagatgaagtacaggccccccaagaccaagttcttcttcacggtcatccctcagcccatcttcctgagcccaggcataaccctcacgctccccatcgtcttccggcctctggaggcgaaggagtacatggaccagctgtggtttgagaaagcggaggggatgttctgtgtcggcctacgggccaccctgccctgccacaggctgatctgccgcccaccatccctgcagctgcccatgtgtgctgtgggagatacgactgaggcctttttctgcctggataatgtgggggacctgcccaccttcttcacctgggagttctccagcccattccagatgctgcccgccacggggctcctggagccaggccaggcctctcagatcaaggtgacctttcagccccttacagccgtcatctacgaggtgcaggccacgtgctggtacggggcgggcagccggcagaggagcagcatccagctgcaggctgtggccaagtgcgcccagctgctggtgagcataaagcacaagtgcccggaggaccaggatgccgagggcttccagaagctgttgtactttggctctgttgctgtgggctgcacctcggagaggcagatcaggctacacaacccgtcggcggtaaatgcccccttcaggattgaaatttccccggatgaactggccgaagaccaggccttctcatgccccacggcccatggcatcgtgcttccgggagagaagaaatgtgtgtcggtgttcttccaccccaagactctggacaccagaactgtggactactgctccatcatgccttctggctgtgcctccaagaccctgcttaaagtcgttggtttctgtagaggccctgctgtgtccctgcagcactactgtgtcaacttcagctgggtcaaccttggggagcgctccgagcagcccctgtggattgagaaccaatcggactgcacggcccacttccagtttgccatcgactgcttggagagtgtctttaccatcaggcctgcctttgggacgctggtgggcaaggcccgtatgaccctgcactgtgccttccagcccactcaccccatcatctgctttcggcgtgtggcctgtctcatccaccaccaggacccactgttcctggacctgatggggacctgccactcggacagcaccaagccagccatcctgaagcctcagcacctcacctggtaccgcacacacctggcccggggcctgacgctctacccccctgacatcctggatgccatgctgaaggagaagaagctggcacaggaccagaacggggctctcatgattcccatccaggatctggaggacatgccggccccgcagtacccttatatcccccccatgaccgagttcttcttcgacggcaccagcgacataaccatcttccccccgcccatcagtgtagagcctgtcgaggtagacttcggtgcctgcccagggcctgaggcccccaaccctgtacccctgtgcctgatgaaccacaccaagggcaagatcatggtggtctggacgcgaaggtctgactgccccttctgggtgactccagagagctgcgacgtgcccccactcaagtccatggccatgcgcctgcacttccagccgcctcaccccaactgcctttacacggtggagctcgaagccttcgccatctataaggtcctgcagagctacagtaatattgaggaggactgcaccatgtgcccatcctggtgcctgacggtgcgggcacgaggccacagctatttcgctggctttgagcaccacatcccccagtattccctagatgtccccaagctatttccagcagtgtcctccggtgagcccacctaccgcagcctgctcctggtcaacaaagactgcaagctgctgaccttcagcctggccccccagagaggctcagacgtcatccttcggcccacttcgggccttgtggcacccggggcccaccagatcatcctcatctgcacctaccctgagggcagctcctggaagcagcacactttctatctgcagtgcaatgcttccccccagtatctcaaggaggtgagcatgtacagccgggaggagccactgcagctgaagctggacacccacaaaagcctctacttcaagcccacctgggtgggctgctcctccaccagccccttcaccttccgcaacccctcgcgtctgcccctgcagttcgagtggagggtctctgagcagcatcgaaagctgctggctgtccagccctccagggggctaatccagcccaacgagagacttacgctgacgtggaccttcagccctttggaggagaccaagtacctgttccaagtggggatgtgggtctgggaagccggcctgtccccaaatgccaaccccgctgccaccacccactacatgctccggctggtgggcgttgggctcaccagcagcctctctgcaaaggaaaaggagctggcctttgggaatgtgctggtgaacagcaagcagtccaggttccttgtcctcctgaatgacggcaactgcaccctctattaccgcctctacctggagcagggcagccctgaggccgttgacaaccaccccctcgctctgcagctggaccgaacagaggggagcatgccaccccggtcccaggacaccatctgcctgactgcctgtcccaagcagcggtcccagtactcctggaccatcacctactctctcctttcccacagagataacaaggctggggagaagcaggagctgtgctgcgtctccctggtggccgtgtaccccttgctttccatcctggatgtcagctccatgggcagtgctgagggtatcacccggaagcacctgtggcgcctcttctctctggacctgcttaacagttacttggagcgtgaccccaccccctgtgagctcacctacaaggtgcccacccggcacagcatgagccagatcccccccgtcctcacccctttaaggcttgacttcaatttcggggccgcaccattcaaggccccaccttccgtggtattcctggccctgaagaacagcggagtggtgtccctggactgggccttcctccttccaagtgaccagcggattgacgtggagctctgggcagagcaagcagagttgaattccactgagctccaccagatgcgcgtgcaggacaattgcctcttctccatcagccccaaggctgggagcctgagtcctgggcaggagcagatggtggagttaaaatacagccacctgttcatcggtactgatcacctcccagtgctcttcaaggtgtcccatggccgggagatcctgctaaatttcataggtgtgacagtgaagccggagcagaagtatgtgcacttcacctctactacccaccagttcatccccattcccattggtgacacgctacccccacggcagatttatgagctgtataatggtggctcagtgcccgtgacatatgaggtccagaccgatgtcctgtcacaggttcaggaaaaaaattttgatcaccccatcttttgctgcctcaaccccaaaggggagatccagccaggcagcactgcccgggtcttgtggatcttctcacctatcgaggccaagacctacacggtggacgtgcccatacacatcctgggatggaactcggccctcatccacttccagggagtgggctacaacccccatatgatgggggacacagccccattccacaacatctcctcgtgggacaacagttccatacactctaggctggtggtgcctggacagaatgtcttcctgtcccagtctcatatttccctgggaaacatacctgtgcagagcaagtgcagccgcctgctcttcctcaacaacatctccaagaacgaggaaattgccttctcctggcagccaagtcctctagattttggggaggtgtctgtgagtcccatgataggggtggtggctcctgaagagacggtcccatttgtggtgaccttgagggcctctgtgcatgccagcttctacagtgcagacctggtatgcaagctgtactcgcagcagctcatgaggcagtatcacaaggagctgcaggagtggaaggacgagaaggtgcggcaggaagtggagttcaccatcaccgacatgaaagtgaagaagagaacatgctgcacagcctgtgaacctgcgaggaagtacaagacactgcctcccatcaagaaccagcagtctgtcagccggcctgccagctggaaactgcagaccccaaaggaggaggtgtcctggccctgcccccagccaccctcgccaggcatgctctgcctgggccttactgcccgagcccatgccaccgactactttctggctaacttcttctcagagtttccctgccactttttgcaccgggagctgccaaagaggaaggcccccagggaagagtcagagacttctgaggaaaaatcccctaacaagtggggccctgtttccaagcagaagaagcagctcctggttgacattctcaccacaataatcaggggcctgctggaagacaagaacttccatgaggctgtggaccaaagcctggtggagcaggtgccgtacttccgccaattctggaatgagcagtcaactaagttcatggaccagaaaaacagcctgtacttaatgccaatcctgcctgtaccctccagcagctgggaggatgggaagggcaagcagccgaaggaagacagaccagagcactatccagggttgggaaagaaggaagagggggaggaggagaagggtgaagaggaagaagaagagttggaggaggaagaggaggaagaagaggagacagaagaggaggagttgggcaaggaggagatagaggagaaggaggaggagagggatgagaaggaagagaaagtgagctgggcgggcatcgggcccacaccacagcctgagtcccaggagtccatgcaatggcagtggcaacagcagctgaatgtcatggtgaaggaggagcaagaacaggacgagaaggaggccatcagaaggctcccggccttcgccaacctgcaggaggcgctgctggagaacatgatccagaacatcctggtggaggcgagccgcggggaggtggtactcacctcgcggccacgcgtcatcgccctgccgccgttctgcgtgcccaggagtctgaccccggacacgctgctgccgacgcagcaagcagaggtactccacccggtggtgccacttcctaccgaccttccgtaa

SEQ ID NO: 33 - DNA, 345 bp, Homo sapiens
atgagacttctcatcctggccctccttggcatctgctctctcactgcatacattgtggaaggtgtagggagtgaagtctcagataagaggacctgtgtgagcctcactacccagcgactgccggttagcagaatcaagacctacaccatcacggaaggctccttgagagcagtaatttttattaccaaacgtggcctaaaagtctgtgctgatccacaagccacatgggtgagagacgtggtcaggagcatggacaggaaatccaacaccagaaataacatgatccagaccaagccaacaggaacccagcaatcgaccaatacagctgtgactctgactggctag

SEQ ID NO: 34 - DNA, 3573 bp, Homo sapiens
atgaagacacgacagaataaagactcgatgtcaatgaggagtggacggaagaaagaggcccctgggccccgggaagaactgagatcgaggggccgggcctcccctggaggggtcagcacgtccagcagtgatggcaaagctgagaagtccaggcagacagccaagaaggcccgagtagaggaagcctccaccccaaaggtcaacaagcagggtcggagtgaggagatctcagagagtgaaagtgaggagaccaatgcaccaaaaaagaccaaaactgagcaggaactccctcggccacagtctccctccgatctggatagcttggacgggcggagccttaatgatgatggcagcagcgaccctagggatatcgaccaggacaaccgaagcacgtcccccagtatctacagccctggaagtgtggagaatgactctgactcatcttctggcctgtcccagggcccagcccgcccctaccacccacctccactctttcctccttcccctcaaccgccagacagcacccctcgacagccagaggctagctttgaaccccatccttctgtgacacccactggatatcatgctcccatggagccccccacatctcgaatgttccaggctcctcctggggcccctccccctcacccacagctctatcctgggggcactggtggagttttgtctggacccccaatgggtcccaaggggggaggggctgcctcatcagtggggggccctaatgggggtaagcagcaccccccacccactactcccatttcagtatcaagctctggggctagtggtgctcccccaacaaagccgcctaccactccagtgggtggtgggaacctaccttctgctccaccaccagccaacttcccccatgtgacaccgaacctgcctcccccacctgccctgagacccctcaacaatgcatcagcctctccccctggcctgggggcccaaccactacctggtcatctgccctctccccacgccatgggacagggtatgggtggacttcctcctggcccagagaagggcccaactctggctccttcaccccactctctgcctcctgcttcctcttctgctccagcgccccccatgaggtttccttattcatcctctagtagtagctctgcagcagcctcctcttccagttcttcctcctcttcctctgcctcccccttcccagcttcccaggcattgcccagctacccccactctttccctcccccaacaagcctctctgtctccaatcagccccccaagtatactcagccttctctcccatcccaggctgtgtggagccagggtcccccaccacctcctccctatggccgcctcttagccaacagcaatgcccatccaggccccttccctccctctactggggcccagtccaccgcccacccaccagtctcaacacatcaccatcaccaccagcaacagcaacagcagcagcagcagcagcagcagcagcagcagcagcagcagcagcatcacggaaactctgggccccctcctcctggagcatttccccacccactggagggcggtagctcccaccacgcacacccttacgccatgtctccctccctggggtctctgaggccctacccaccagggccagcacacctgcccccacctcacagccaggtgtcctacagccaagcaggccccaatggccctccagtctcttcctcttccaactcttcctcttccacttctcaagggtcctacccatgttcacacccctccccttcccagggccctcaaggggcgccctaccctttcccaccggtgcctacggtcaccacctcttcggctaccctttccacggtcattgccaccgtggcttcctcgccagcaggctacaaaacggcctccccacctgggcccccaccgtacggaaagagagccccgtccccgggggcctacaagacagccaccccacccggatacaaacccgggtcgcctccctccttccgaacggggaccccaccgggctatcgaggaacctcgccacctgcaggcccagggaccttcaagccgggctcgcccaccgtgggacctgggcccctgccacctgcggggccctcaggcctgccatcgctgccaccaccacctgcggcccctgcctcagggccgcccctgagcgccacgcagatcaaacaggagccggctgaggagtatgagacccccgagagcccggtgcccccagcccgcagcccctcgccccctcccaaggtggtagatgtacccagccatgccagtcagtctgccaggttcaacaaacacctggatcgcggcttcaactcgtgcgcgcgcagcgacctgtacttcgtgccactggagggctccaagctggccaagaagcgggccgacctggtggagaaggtgcggcgcgaggccgagcagcgcgcgcgcgaagaaaaggagcgcgagcgcgagcgggaacgcgagaaagagcgcgagcgcgagaaggagcgcgagcttgaacgcagcgtgaagttggctcaggagggccgtgctccggtggaatgcccatctctgggcccagtgccccatcgccctccatttgaaccgggcagtgcggtggctacagtgcccccctacctgggtcctgacactccagccttgcgcactctcagtgaatatgcccggcctcatgtcatgtctcctggcaatcgcaaccatccattctacgtgcccctgggggcagtggacccggggctcctgggttacaatgtcccggccctgtacagcagtgatccagctgcccgggagagggaacgggaagcccgtgaacgagacctccgtgaccgcctcaagcctggctttgaggtgaagcctagtgagctggaacccctacatggggtccctgggccgggcttggatccctttccccgacatgggggcctggctctgcagcctggcccacctggcctgcaccctttcccctttcatccgagcctggggcccctggagcgagaacgtctagcgctggcagctgggccagccctgcggcctgacatgtcctatgctgagcggctggcagctgagaggcagcacgcagaaagggtggcggccctgggcaatgacccactggcccggctgcagatgctcaatgtgactccccatcaccaccagcactcccacatccactcgcacctgcacctgcaccagcaagatgctatccatgcagcctctgcctcggtgcaccctctcattgaccccctggcctcagggtctcaccttacccggatcccctacccagctggaactctccctaaccccctgcttcctcaccctctgcacgagaacgaagttcttcgtcaccagctctttgctgccccttaccgggacctgccggcctccctttctgccccgatgtcagcagctcatcagctgcaggccatgcacgcacagtcagctgagctgcagcgcttggcgctggaacagcagcagtggctgcatgcccatcacccgctgcacagtgtgccgctgcctgcccaggaggactactacagtcacctgaagaaggaaagcgacaagccactgtag

SEQ ID NO: 35 - DNA, 1401 bp, Homo sapiens
atggcggaggagcaggacctatcggaggtggagctgagccccgtgggctcggaggagccccgctgcctgtccccggggagcgcgccctcgctagggcccgacggcggcggcggcggatcgggcctgcgagccagcccggggccaggcgagctgggcaaggtcaagaaggagcagcaggacggcgaggcggacgatgacaagttccccgtgtgcatccgcgaggccgtcagccaggtgctcagcggctacgactggacgctggtgcccatgcccgtgcgcgtcaacggcgccagcaaaagcaagccgcacgtcaagcggcccatgaacgccttcatggtgtgggctcaggcagcgcgcaggaagctcgcggaccagtacccgcacctgcacaacgctgagctcagcaagacgctgggcaagctctggaggctgctgaacgaaagtgacaagcgccccttcatcgaggaggctgagcggctccgtatgcagcacaagaaagaccacccggactacaagtaccagcccaggcggcggaagaacgggaaggccgcccagggcgaggcggagtgccccggtggggaggccgagcaaggtgggaccgccgccatccaggcccactacaagagcgcccacttggaccaccggcacccaggagagggctcccccatgtcagatgggaaccccgagcacccctcaggccagagccatggcccacccacccctccaaccaccccgaagacagagctgcagtcgggcaaggcagacccgaagcgggacgggcgctccatgggggagggcgggaagcctcacatcgacttcggcaacgtggacattggtgagatcagccacgaggtaatgtccaacatggagacctttgatgtggctgagttggaccagtacctgccgcccaatgggcacccaggccatgtgagcagctactcagcagccggctatgggctgggcagtgccctggccgtggccagtggacactccgcctggatctccaagccaccaggcgtggctctgcccacggtctcaccacctggtgtggatgccaaagcccaggtgaagacagagaccgcggggccccaggggcccccacactacaccgaccagccatccacctcacagatcgcctacacctccctcagcctgccccactatggctcagccttcccctccatctcccgcccccagtttgactactctgaccatcagccctcaggaccctattatggccactcgggccaggcctctggcctctactcggccttctcctatatggggccctcgcagcggcccctctacacggccatctctgaccccagcccctcagggccccagtcccacagccccacacactgggagcagccagtatatacgacactgtcccggccctaa

SEQ ID NO: 36 - DNA, 1353 bp, Homo sapiens
atgttgtggaaaataaccgataatgtcaagtacgaagaggactgcgaggatcgccacgacgggagcagcaatgggaatccgcgggtcccccacctctcctccgccgggcagcacctctacagccccgcgccacccctctcccacactggagtcgccgaatatcagccgccaccctactttccccctccctaccagcagctggcctactcccagtcggccgacccctactcgcatctgggggaagcgtacgccgccgccatcaaccccctgcaccagccggcgcccacaggcagccagcagcaggcctggcccggccgccagagccaggagggagcggggctgccctcgcaccacgggcgcccggccggcctactgccccacctctccgggctggaggcgggcgcggtgagcgcccgcagggatgcctaccgccgctccgacctgctgctgccccacgcacacgccctggatgccgcgggcctggccgagaacctggggctccacgacatgcctcaccagatggacgaggtgcagaatgtcgacgaccagcacctgttgctgcacgatcagacagtcattcgcaaaggtcccatttccatgaccaagaaccctctgaacctcccctgtcagaaggagctggtgggggccgtaatgaaccccactgaggtcttctgctcagtccctggaagattgtcgctcctcagctctacgtctaaatacaaagtgacagtggctgaagtacagaggcgactgtccccacctgaatgcttaaatgcctcgttactgggaggtgttctcagaagagccaaatcgaaaaatggaggccggtccttgcgggagaagttggacaagattgggttgaatcttccggccgggaggcggaaagccgctcatgtgactctcctgacatccttagtagaaggtgaagctgttcatttggctagggactttgcctatgtctgtgaagccgaatttcctagtaaaccagtggcagaatatttaaccagacctcatcttggaggacgaaatgagatggcagctaggaagaacatgctattggcggcccagcaactgtgtaaagaattcacagaacttctcagccaagaccggacaccccatgggaccagcaggctcgccccagtcttggagacgaacatacagaactgcttgtctcatttcagcctgattacccacgggtttggcagccaggccatctgtgccgcggtgtctgccctgcagaactacatcaaagaagccctgattgtcatagacaaatcctacatgaaccctggagaccagagtccagctgattctaacaaaaccctggagaaaatggagaaacacaggaaataa

SEQ ID NO: 37 - DNA, 594 bp, Homo sapiens
atgtgtacgggaaaatgtgcccgctgtgtggggctctccctcattaccctctgcctcgtctgcattgtggccaacgccctcctgctggtacctaatggggagacctcctggaccaacaccaaccatctcagcttgcaagtctggctcatgggcggcttcattggcgggggcctaatggtactgtgtccggggattgcagccgttcgggcagggggcaagggctgctgtggtgctgggtgctgtggaaaccgctgcaggatgctgcgctcggtcttctcctcggcgttcggggtgcttggtgccatctactgcctctcggtgtctggagctgggctccgaaatggacccagatgcttaatgaacggcgagtggggctaccacttcgaagacaccgcgggagcttacttgctcaaccgcactctatgggatcggtgcgaggcgccccctcgcgtggtcccctggaatgtgacgctcttctcgctgctggtggccgcctcctgcctggagatagtactgtgtgggatccagctggtgaacgcgaccattggtgtcttctgcggcgattgcaggaaaaaacaggacacacctcactga

SEQ ID NO: 38 - DNA, 2982 bp, Homo sapiens
atggcctcggcagctgtggagagcttcgtgaccaagcaactggacctgctggagcttgagagagacgcggaggtggaggagcgcaggtcctggcaggagaacatctctctgaaagagctccagagccgaggcgtgtgtttgctgaagctgcaggtatccagccagcgcactgggctgtacggacggctgctggtcacctttgagcccaggcgatacgggtccgcggcagctcttcccagtaacagctttacttctggtgatatcgtgggcctgtacgatgctgctaatgagggcagtcagctggccactgggatcttgacccgggtcacccagaagtcggtcacggtggcctttgatgagtcccacgatttccagttgagcttggaccgagagaattcctacagactgttaaaacttgccaatgatgtcacttacaggcgactgaaaaaagccctgattgctctaaagaagtatcattctggcccagcctcctcactcatagaagtgctctttggcagatctgctcccagtcctgccagtgaaatacacccgctgacattcttcaacacctgcctggacacctcccagaaagaagcggttttatttgcgctgtctcagaaagaacttgccatcatccatggacctcctggcactgggaaaaccacgactgtggttgagatcattcttcaagctgtgaaacaaggcttaaaggttctgtgctgcgccccctccaacatcgccgtggacaatctggtggagcgcctggctctgtgtaagcagcggattctgcgcctgggacaccctgcccgcctcctggagtccattcagcagcactccctggatgcggttttagcgcggagcgacagtgcccagattgttgcagatatcaggaaggacatcgaccaggtctttgtgaaaaacaaaaagacccaggataagagagagaaaagtaattttcgaaatgaaattaagctgttaagaaaagaactgaaggagagggaagaagcagctatgctcgagagcctcacttcggcaaacgtggtccttgcaacaaacacaggtgcgtctgccgatggccccctgaagttgctgcccgagagctacttcgacgtggtggtcattgacgagtgtgcccaggccctcgaggcgagctgctggatccccctgctgaaggccagaaagtgcatcctggcgggcgatcacaagcagctgccccccaccacagtctctcacaaggctgcgctggcaggactgtcactcagcctgatggaacgcctggctgaggagtacggcgcgagggtggtgcggacactgacggtgcagtaccgcatgcaccaggctatcatgcgctgggcctcagacaccatgtaccttgggcagctcacagcccactcttccgtggcaaggcacctcctgagggacctcccaggtgtggctgccacagaagagacgggtgtgcccctgctcttggtggacaccgccggctgcgggctgtttgagctggaggaggaggacgaacagtcgaaagggaaccctggcgaagtccgcctcgtcagtttgcacatccaggctctggtggacgctggtgttccagcccgtgacattgctgtggtctcgccatacaacctccaggtggacctgctcagacagagccttgtgcacaggcaccctgagcttgaaatcaagtctgtcgatggcttccaaggccgagagaaggaggccgtgatactgtccttcgtcagatccaacaggaaaggtgaagttggttttcttgctgaggaccggaggatcaacgtggctgtcacccgtgcccgacgccacgtggcggtcatctgtgactcccgtactgtcaacaaccatgcatttttgaagaccctggtggagtatttcacacagcatggggaagtacgcacggcctttgagtatcttgacgatattgtcccagaaaactattcccatgagaactcccagggttccagccacgctgccaccaagccccagggacctgctacgtccaccaggaccggaagccagcggcaggagggaggccaggaggctgcagcacctgccagacagggccggaagaagccggctgggaagtctctggcctctgaagctccatctcagcccagcctcaacggaggcagcccagagggagtggagagccaagatggcgtggaccacttccgggccatgatagtggagttcatggccagcaagaagatgcagttggagtttcctccttccctcaattcccacgacaggctgcgggtccaccaaatagccgaggagcacgggctgaggcacgacagttccggggaagggaagaggaggttcatcactgtgagcaagagggccccgcgaccccgagcagccctgggacccccagcagggaccggtggcccagcccctctccagccagtgccccctacccctgcgcagacagagcagcctcccagggagcagcgtggcccagaccagcctgatctgaggacgctgcacctggagagactgcagagggtcaggagcgcgcaggggcagcccgccagcaaggagcagcaggcctcagggcagcagaaacttccagaaaagaaaaagaaaaaagccaaaggacatccggccacagatctgcccacggaggaggactttgaggccctggtttctgccgccgttaaggctgataacacctgcggctttgccaagtgcacagccggcgtcacaaccctgggccagttctgccagctctgcagccgccgctactgcctcagccaccacctgcccgagatccatggctgcggtgagagggctcgcgcccatgcccggcagagaatcagccgggaaggggtcctctatgccggcagcgggaccaagaacggatccctggacccagccaagagggcccagctgcagaggaggctggataagaagctgagtgagctcagcaaccagaggaccagccggaggaaggagagggggacgtga

SEQ ID NO: 39 - DNA, 564 bp, Homo sapiens
atggtggcggcgacggtggcagcggcgtggctgctcctgtgggctgcggcctgcgcgcagcaggagcaggacttctacgacttcaaggcggtcaacatccggggcaaactggtgtcgctggagaagtaccgcggatcggtgtccctggtggtgaatgtggccagcgagtgcggcttcacagaccagcactaccgagccctgcagcagctgcagcgagacctgggcccccaccactttaacgtgctcgccttcccctgcaaccagtttggccaacaggagcctgacagcaacaaggagattgagagctttgcccgccgcacctacagtgtctcattccccatgtttagcaagattgcagtcaccggtactggtgcccatcctgccttcaagtacctggcccagacttctgggaaggagcccacctggaacttctggaagtacctagtagccccagatggaaaggtggtaggggcttgggacccaactgtgtcagtggaggaggtcagaccccagatcacagcgctcgtgaggaagctcatcctactgaagcgagaagacttataa

SEQ ID NO: 40 - DNA, 2502 bp, Homo sapiens
atggccccacactgggctgtctggctgctggcagcaaggctgtggggcctgggcattggggctgaggtgtggtggaaccttgtgccgcgtaagacagtgtcttctggggagctggccacggtagtacggcggttctcccagaccggcatccaggacttcctgacactgacgctgacggagcccactgggcttctgtacgtgggcgcccgagaggccctgtttgccttcagcatggaggccctggagctgcaaggagcgatctcctgggaggcccccgtggagaagaagactgagtgtatccagaaagggaagaacaaccagaccgagtgcttcaacttcatccgcttcctgcagccctacaatgcctcccacctgtacgtctgtggcacctacgccttccagcccaagtgcacctacgtcaacatgctcaccttcactttggagcatggagagtttgaagatgggaagggcaagtgtccctatgacccagctaagggccatgctggccttcttgtggatggtgagctgtactcggccacactcaacaacttcctgggcacggaacccattatcctgcgtaacatggggccccaccactccatgaagacagagtacctggccttttggctcaacgaacctcactttgtaggctctgcctatgtacctgagagtgtgggcagcttcacgggggacgacgacaaggtctacttcttcttcagggagcgggcagtggagtccgactgctatgccgagcaggtggtggctcgtgtggcccgtgtctgcaagggcgatatggggggcgcacggaccctgcagaggaagtggaccacgttcctgaaggcgcggctggcatgctctgccccgaactggcagctctacttcaaccagctgcaggcgatgcacaccctgcaggacacctcctggcacaacaccaccttctttggggtttttcaagcacagtggggtgacatgtacctgtcggccatctgtgagtaccagttggaagagatccagcgggtgtttgagggcccctataaggagtaccatgaggaagcccagaagtgggaccgctacactgaccctgtacccagccctcggcctggctcgtgcattaacaactggcatcggcgccacggctacaccagctccctggagctacccgacaacatcctcaacttcgtcaagaagcacccgctgatggaggagcaggtggggcctcggtggagccgccccctgctcgtgaagaagggcaccaacttcacccacctggtggccgaccgggttacaggacttgatggagccacctatacagtgctgttcattggcacaggagacggctggctgctcaaggctgtgagcctggggccctgggttcacctgattgaggagctgcagctgtttgaccaggagcccatgagaagcctggtgctatctcagagcaagaagctgctctttgccggctcccgctctcagctggtgcagctgcccgtggccgactgcatgaagtatcgctcctgtgcagactgtgtcctcgcccgggacccctattgcgcctggagcgtcaacaccagccgctgtgtggccgtgggtggccactctggatctctactgatccagcatgtgatgacctcggacacttcaggcatctgcaacctccgtggcagtaagaaagtcaggcccactcccaaaaacatcacggtggtggcgggcacagacctggtgctgccctgccacctctcctccaacttggcccatgcccgctggacctttgggggccgggacctgcctgcggaacagcccgggtccttcctctacgatgcccggctccaggccctggttgtgatggctgcccagccccgccatgccggggcctaccactgcttttcagaggagcagggggcgcggctggctgctgaaggctaccttgtggctgtcgtggcaggcccgtcggtgaccttggaggcccgggcccccctggaaaacctggggctggtgtggctggcggtggtggccctgggggctgtgtgcctggtgctgctgctgctggtgctgtcattgcgccggcggctgcgggaagagctggagaaaggggccaaggctactgagaggaccttggtgtaccccctggagctgcccaaggagcccaccagtccccccttccggccctgtcctgaaccagatgagaaactttgggatcctgtcggttactactattcagatggctcccttaagatagtacctgggcatgcccggtgccagcccggtggggggcccccttcgccacctccaggcatcccaggccagcctctgccttctccaactcggcttcacctggggggtgggcggaactcaaatgccaatggttacgtgcgcttacaactaggaggggaggaccggggagggctcgggcaccccctgcctgagctcgcggatgaactgagacgcaaactgcagcaacgccagccactgcccgactccaaccccgaggagtcatcagtatga

SEQ ID NO: 41 - DNA, 1044 bp, Homo sapiens
atgtcgttcgtcctgtccagaatggcagcctgtggaggcacctgcaagaacaaagtgactgtgtccaagcccgtgtgggacttcctgagcaaagagaccccagcccggctggcccggcttcgggaggagcaccgtgtgtccatcctcatagatggcgagacttctgacatctatgttctccagctttccccacagggtcctcccccggcccctccaaatgggctctacctagcccggaaggctctcaaggggctgctaaaagaggcagagaaagagctgaagaaagctcagaggcagggggagctgatgggctgcctggctctggggggtggaggggagcaccctgagatgcaccgcgcaggcccaccccctctccgagcagccccacttctgcccccaggagctcgggggctcccccctcctcctccccccctgcccccacctcttcctcctcgccttcgggaggaggcagaagagcaggagagcacctgccccatctgtctgggggagatccagaatgccaagacattggagaagtgccggcattcattctgcgagggctgcatcacccgggctctgcaggtgaaaaaggcctgccccatgtgcggccgcttctatgggcagctggtgggcaaccagccccagaatgggcggatgctggtctctaaggacgccaccctcctactgcccagctatgagaagtacggcaccattgtcatccagtacgtcttcccgcccggtgtccagggggctgaacacccaaacccaggagttcggtatcctggcaccacacgggtggcctacctcccggactgccctgagggcaacaaggtgctgaccctgttccgcaaggcgtttgaccagcgtctcaccttcactatcggcacgtccatgaccacagggagaccgaatgtcatcacctggaacgacatccaccacaagaccagctgcacagggggaccccagctgtttgggtacccagaccccacctacctgacccgggtgcaagaggagctgagagcgaagggtatcacagatgactga

SEQ ID NO: 42 - DNA, 3399 bp, Homo sapiens
atggagctcttccaagccaaggaccactacatcctgcagcagggcgagcgcgcgctgtggtgcagccgccgcgacggcggcctccagctccgacccgctactgatctacttcttgcctggaatcccatttgtttggggttggtagaaggtgttattgggaaaattcaacttcattcagatcttccatggtggcttattctaattcggcagaaagcattggtgggcaaactcccaggagaccatgaggtctgtaaagttaccaaaattgctgtgctctcactttctgaaatggaacctcaggatcttgagctagagctctgtaagaagcatcattttggtattaacaaaccagagaagatcataccatctcctgatgactcaaagtttctactgaagacctttacgcatattaaatccaatgtgtctgctcctaataaaaagaaagttaaggaaagtaaagagaaggagaagttggagaggagattacttgaagagttgctgaagatgttcatggactcagaatccttttattatagcttgacctatgacctgaccaattccgtgcagaggcagagcactggggagagggacggtcggcccctctggcagaaggttgatgaccgatttttttggaataaatacatgatacaagatcttactgagattggtactccagatgtggacttttggattatccccatgatccaaggttttgtgcagattgaagaacttgtggttaattataccgaatcatctgatgatgagaaaagcagcccagagaccccccctcaggagtccacctgtgtagatgatattcacccacgatttctagtggctctcatttcacgccgaagtaggcacagagcaggaatgcgctataaacgaagaggagtggataaaaatggaaatgttgccaattatgtggagactgagcagttgattcatgttcataatcataccctgtcatttgttcaaacacgaggctctgtgcctgtcttttggagccaggttgggtatcgatataacccaagaccgcggctggacagaagtgaaaaggaaactgttgcctatttctgtgcccatttcgaagaacaactgaacatttacaaaaaacaggttattattaacttggtagaccaggcaggaagagagaagattattggcgatgcttacctgaagcaagtgttgcttttcaacaactcacacctcacttacgtttcgtttgacttccatgagcactgccgaggaatgaagtttgagaatgttcagacactaacagatgccatttatgacattattcttgatatgaagtggtgttgggttgatgaagctggggtaatatgtaagcaggaagggatttttcgtgttaattgtatggactgcctggatcgcaccaacgtggtccaagctgccatcgcgagagtggtcatggaacagcagctgaaaaaattaggtgtgatgcccccggaacagccattacctgtgaaatgtaatcgcatctaccagataatgtgggccaataatggtgactccattagcagacagtatgctgggacagctgctctgaagggtgactttacaaggacaggagaaaggaagttagcaggagttatgaaagatggagtgaactcagcaaacagatattacctcaaccgatttaaggatgcttataggcaagctgttatagatttgatgcaaggcattccagtgacagaagatctttattccatatttaccaaggagaaagaacatgaagctttgcataaggaaaatcagagaagccaccaggaactaattagccagctcttacaaagttacatgaagttactactgcctgatgatgagaagttccatgggggctgggccctcattgactgtgaccctagcctcattgatgctactcacagagacgtggatgtgctgttactgctttctaactctgcctactacgtggcctattatgatgatgaagttgataaagtaaaccagtatcaacgactaagtctagaaaacctggaaaaaattgaaataggccctgaacccactctttttggtaagccaaagttctcctgcatgcgactgcactacagatacaaagaagcgagtggctatttccacacattgcgagctgtaatgcgtaatcctgaagaggatggaaaagatacccttcagtgcattgcagagatgctgcagatcaccaagcaagccatgggatcggatttacccataattgagaagaaacttgagaggaagagcagtaaacctcacgaagacatcattggtatcaggtctcaaaaccaaggttctttggcccagggaaagaattttttaatgagcaaattttcatctctaaatcaaaaagtgaagcagaccaaatccaatgtaaatattggcaacctccgaaagctaggaaactttaccaaacctgaaatgaaagttaactttctaaaaccaaacttaaaagtaaatctttggaaatcagatagtagtcttgaaactatggaaaacacaggagtgatggataaggttcaggcagagtctgatggggacatgtcttcagataatgactcataccactctgatgaattccttacaaattctaagtctgatgaagacaggcagctagctaactcattagagagtgtagggccaatagattacgttcttcctagttgtggtattattgcctcagcgcctcgattgggcagtcggtcccagtctcttagcagcacagatagtagcgttcatgctccttcagagattactgttgctcatgggagtgggcttggaaaaggccaggagtctcctttgaagaaaagtccttctgctggcgacgtacacatattgactggctttgccaagcctatggatatttactgccacagatttgtgcaagatgcacagaacaaagtgacccacctatcagagaccagatctgtgtctcagcaggctagtcaggaaagaaatcaaatgaccaatcaagtttcaaatgaaacccaatcagaatcaacagaacagacaccttctcggccatcgcaattagatgtctctctttctgcaacaggcccacagtttttgtcagttgagccagcgcattcagttgcatctcaaaaaacccccacctccgcttccagcatgcttgaacttgagacagggcttcatgtaactccttctccttcagagagcagtagcagcagagcagtctctccctttgccaagattcgaagttccatggtccaggttgctagtattacccaagctggattaacccatgggataaactttgcagtgtcaaaagttcagaagagtcctccagaacctgaaatcattaatcaagtccagcaaaatgaacttaaaaagatgtttatacaatgccagacacggataattcagatttag

SEQ ID NO: 43 - DNA, 5598 bp, Homo sapiens
atgacgcgctgggtgcccaccaagcgcgaggagaagtacggcgtggctttttataactatgatgccagaggagcggatgaactttctttacagatcggagacactgtgcacatcttagaaacatatgaagggtggtaccgaggttacacgttacgaaaaaagtctaagaagggtatatttcctgcttcatatattcatcttaaagaagcgatagttgaaggaaaagggcaacatgaaacagtcatcccgggtgacctccccctcatccaggaagtcaccacgacactccgagagtggtccaccatctggaggcagctctacgtgcaagataacagggagatgtttcgaagtgtgcggcacatgatctatgaccttattgaatggcgatcacaaattctttctggaactctgcctcaggatgaactcaaagaactgaagaagaaggtcacagccaaaattgattatggaaacagaattctagatttggacctggtggttagagatgaagatgggaatattttggatccagaattaactagcacgattagtctcttcagagctcatgaaatagcttctaaacaagtggaggaaaggttacaagaggaaaaatctcaaaagcagaacatagatattaacagacaagccaagtttgctgcaaccccttctctggccttgtttgtgaacctcaaaaatgtggtttgtaaaataggagaagatgctgaagtcctcatgtctctatatgaccctgtggagtccaaattcatcagtgagaactacctggttcgctggtccagttcaggattacctaaagacatagacagattacataatttgcgagccgtgtttactgacctcggaagcaaagacctgaaaagggagaaaatcagttttgtctgtcagattgttcgcgtgggtcgcatggagctgagggacaacaacaccaggaaactgacctcggggttgcggcgaccttttggagtggctgtgatggatgtaacagatataataaatggaaaagtagatgatgaagataagcagcatttcattccctttcagccggtggcaggggagaatgacttccttcagactgttataaacaaagtcatcgctgccaaagaagtcaaccacaaggggcagggtttgtgggtaacattgaaattacttcctggagatatccatcagatccgaaaagagtttccgcatttagtggacaggaccacagctgtggctcgaaaaacagggtttccggagataatcatgcctggtgatgttcgaaatgatatctatgtaacattagttcaaggagattttgataaaggaagcaaaacaacagcgaagaacgtggaggtcacggtgtctgtgtacgatgaggatgggaaacgattagagcatgtgattttcccgggtgctggtgatgaagcgatttcagagtacaaatctgtgatttactaccaagtaaagcagccacgctggtttgagactgttaaggtggccattcccatcgaggacgttaaccgcagtcaccttcggtttaccttccgccacaggtcatcacaggactctaaggataaatctgagaaaatatttgcactagcatttgtcaagctgatgagatacgatggtaccaccctgcgagacggagagcacgatcttatcgtctataaggccgaagcaaagaagctggaagatgctgccacgtacttgagtctgccctccacgaaggcagagttggaagaaaagggccactcggccaccggcaagagcatgcagagccttgggagctgcaccattagcaaggactccttccagatctccacgctcgtgtgctccaccaaactgactcagaacgtggaccttctggggctcttgaaatggcgctccaacaccagcctgctgcagcagaacttgaggcagctgatgaaagtcgatggtggtgaagtagtgaagtttcttcaggacacgttggatgccctcttcaacatcatgatggagaactcagagagtgagacttttgacacgttagtctttgatgctctggtatttatcattggactgattgctgatagaaaatttcagcattttaatcctgttttggaaacttacattaagaaacactttagtgcaacgttagcctacacgaagttgacaaaagtgttgaagaactacgtggacggtgctgagaagccgggagtaaatgagcagctgtacaaagccatgaaagcgctagaatccatcttcaagttcatcgtgcgctccaggatcctgttcaatcaactgtatgaaaacaagggagaggctgacttcgtggaatctttgctgcagctcttcaggtccatcaatgacatgatgagcagcatgtcagaccagaccgtccgggtgaagggggcagcactgaaatacttaccaacgatcgtcaacgatgtgaaattggtgtttgatcccaaagagctcagcaaaatgtttactgaattcatcctcaatgttcccatgggcttgctgaccatccagaaactctactgcttgatcgaaatcgtccacagtgacctcttcacacagcatgactgcagagagatcctgcttcccatgatgaccgatcagctcaagtaccatctggagagacaggaggacctggaggcctgctgtcagctgctcagccacatcctggaggtgctgtacaggaaggacgtggggccaacccagaggcacgtccagattatcatggagaaacttctccggaccgtgaaccgaaccgtcatttccatgggacgagattctgaactcattggaaacttcgtggcttgcatgacagctattttacgacaaatggaagattaccattatgcccacttgatcaagacttttgggaaaatgaggactgatgtggtagatttcctaatggaaacattcatcatgtttaagaacctcattggaaagaacgtttaccccttcgactgggtgatcatgaacatggtgcaaaataaagtcttcctgcgagcaattaatcagtatgcagatatgctgaacaaaaaatttctggatcaagccaactttgagctacagctgtggaacaactactttcacctggctgttgctttccttactcaagagtccctgcaactggagaatttttcaagtgccaagagagccaaaatccttaacaagtacggagatatgaggagacagattggctttgaaatcagagacatgtggtacaaccttggtcaacacaagataaagttcattccagaaatggtgggcccaatattagaaatgacattaattcccgagacggagctgcgcaaagccaccatccccatcttctttgatatgatgcagtgtgaattccattcgacccgaagcttccaaatgtttgaaaatgagatcatcaccaagctggatcatgaagtcgaaggaggcagaggagacgaacagtacaaagtgttatttgataaaatccttctggaacactgcaggaagcacaaatacctcgccaaaacaggagaaacttttgtaaaactcgttgtgcgcttaatggaaaggcttttggattatagaaccatcatgcacgacgagaacaaagaaaaccgcatgagctgcaccgtcaatgtgctgaatttctacaaagaaattgaaagagaagaaatgtatataaggtatttgtacaagctctgtgacctgcacaaggagtgtgataactacaccgaagcggcttacaccttgcttctccatgcaaagcttcttaagtggtcggaggatgtgtgtgtggcccacctcacccagcgggacgggtaccaggccaccacgcagggacagctgaaggagcagctctaccaggaaatcatccactacttcgacaaaggcaagatgtgggaggaggccattgccttgggcaaggagctagccgagcagtatgagaacgaaatgtttgattatgagcaactcagcgaattgctgaaaaaacaggctcagttttatgaaaacatcgtcaaagtgatcaggcccaagcctgactattttgctgttggctactacggacaagggttccccacattcctgcggggaaaagttttcatttaccgagggaaagagtatgagcgccgggaagattttgaggctcggctcttaactcagtttccaaacgccgagaaaatgaagacaacatctccaccaggcgacgatattaaaaactctcctggccagtatattcagtgcttcacagtgaagcccaaactcgatctgcctcctaagtttcacaggccagtgtcagagcagattgtaagtttttacagggtgaacgaggtccagcgatttgaatattctcggccaatccggaagggagagaaaaacccagacaatgaatttgcgaatatgtggatcgagagaaccatatatacaactgcatataaattacctggaattttaaggtggtttgaggtcaagtctgttttcatggtggaaatcagccccctggagaatgccattgagaccatgcagctgacgaacgacaagatcaacagcatggtgcagcagcacctggatgaccccagcctgcccatcaacccgctctccatgctcctgaacggcatcgtggacccagctgtcatggggggcttcgcaaactacgaaaaggccttctttacagaccggtacctgcaggagcaccctgaggcccatgaaaagatcgagaagctcaaggacctgattgcttggcagattccttttctggccgaagggatcagaatccatggagacaaagtcacggaggcactgaggccgttccacgagaggatggaggcctgtttcaaacagctgaaggaaaaggtggagaaagagtacggcgtccgaatcatgccctcaagtctggatgatagaagaggcagccgcccccggtccatggtgcggtccttcacgatgccttcctcatcccgccctctgtctgtggcctctgtctcttccctctcatcggacagcaccccttccagaccaggctccgacgggtttgccctggagcctctcctgccaaagaaaatgcactccaggtcccaggacaagctggacaaggatgacctggagaaggagaagaaggacaagaagaaggaaaaaaggaacagcaaacatcaagagatatttgagaaagaatttaaacccaccgacatttccctgcagcagtctgaggctgtgatcctttcggaaacgataagtcccctgcggccccagagaccgaagagccaggtgatgaacgtcattggaagcgaaaggcgcttctcggtgtccccctcgtcaccgtcctcccagcaaacaccccctccagttacaccaagggccaagctcagcttcagcatgcagtcgagcttggagctgaacggcatgacgggggcggacgtggccgatgtcccaccccctctgcctctcaaaggcagcgtggcagattacgggaatttgatggaaaaccaggacttgctgggctcgccaacacctccacctccccctccacaccagaggcatctgccacctccactgcccagcaaaactccgcctcctccccctccaaagacaactcgcaagcagacatcggtggactccgggatcgtgcagtga

SEQ ID NO: 44 - DNA, 687 bp, Homo sapiens
atggcagaagacaaaaccaaaccgagtgagttggaccaagggaagtatgatgctgatgacaacgtgaagatcatctgcctgggagacagcgcagtgggcaaatccaaactcatggagagatttctcatggatggctttcagccacagcagctgtccacgtacgccctgaccctgtacaagcacacagccacggtagatggaaggaccatccttgtggacttttgggacacggcaggccaggagcggttccagagcatgcatgcctcctactaccacaaggcccacgcctgcatcatggtgtttgatgtacagaggaaagtcacctataggaacctgagcacctggtatacagagcttcgggagttcaggccagagatcccatgcatcgtggtggccaataaaattgatgacataaacgtgacccaaaaaagcttcaattttgccaagaagttctccctgcccctgtatttcgtctcggctgctgatggtaccaatgttgtgaagctcttcaatgatgcaattcgattagctgtgtcttacaaacagaactcccaggacttcatggatgagatttttcaggagctcgagaacttcagcttggagcaggaagaggaggacgtgccagaccaggaacagagcagcagcatcgagaccccatcagaggaggcggcctctccccacagctga

SEQ ID NO: 45 - DNA, 7545 bp, Homo sapiens
atgtcgggatccacacagcctgtggcacagacgtggagggccactgagccccgctacccgccccacagcctttcctacccagtgcagatcgcccggacgcacacggacgtcgggctcctggagtaccagcaccactcccgcgactatgcctcccacctgtcgcccggctccatcatccagccccagcggcggaggccctccctgctgtctgagttccagcccgggaatgaacggtcccaggagctccacctgcggccagagtcccactcatacctgcccgagctggggaagtcagagatggagttcattgaaagcaagcgccctcggctagagctgctgcctgaccccctgctgcgaccgtcacccctgctggccacgggccagcctgcgggatctgaagacctcaccaaggaccgtagcctgacgggcaagctggaaccggtgtctccccccagccccccgcacactgaccctgagctggagctggtgccgccacggctgtccaaggaggagctgatccagaacatggaccgcgtggaccgagagatcaccatggtagagcagcagatctctaagctgaagaagaagcagcaacagctggaggaggaggctgccaagccgcccgagcctgagaagcccgtgtcaccgccgcccatcgagtcgaagcaccgcagcctggtgcagatcatctacgacgagaaccggaagaaggctgaagctgcacatcggattctggaaggcctggggccccaggtggagctgccgctgtacaaccagccctccgacacccggcagtatcatgagaacatcaaaataaaccaggcgatgcggaagaagctaatcttgtacttcaagaggaggaatcacgctcggaaacaatgggagcagaagttctgccagcgctatgaccagctcatggaggcctgggagaagaaggtggagcgcatcgagaacaacccccggcggcgggccaaggagagcaaggtgcgcgagtactacgagaagcagttccctgagatccgcaagcagcgcgagctgcaggagcgcatgcagagcagggtgggccagcggggcagtgggctgtccatgtcggccgcccgcagcgagcacgaggtgtcagagatcatcgatggcctctcagagcaggagaacctggagaagcagatgcgccagctggccgtgatcccgcccatgctgtacgacgctgaccagcagcgcatcaagttcatcaacatgaacgggcttatggccgaccccatgaaggtgtacaaagaccgccaggtcatgaacatgtggagtgagcaggagaaggagaccttccgggagaagttcatgcagcatcccaagaactttggcctgatcgcatcattcctggagaggaagacagtggctgagtgcgtcctctattactacctgactaagaagaatgagaactataagagcctggtgagacggagctatcggcgccgcggcaagagccagcagcagcaacaacagcagcagcagcagcagcagcagcagcagcagcagcccatgccccgcagcagccaggaggagaaagatgagaaggagaaggaaaaggaggcggagaaggaggaggagaagccggaggtggagaacgacaaggaagacctcctcaaggagaagacagacgacacctcaggggaggacaacgacgagaaggaggctgtggcctccaaaggccgcaaaactgccaacagccagggaagacgcaaaggccgcatcacccgctcaatggctaatgaggccaacagcgaggaggccatcaccccccagcagagcgccgagctggcctccatggagctgaatgagagttctcgctggacagaagaagaaatggaaacagccaagaaaggtctcctggaacacggccgcaactggtcggccatcgcccggatggtgggctccaagactgtgtcgcagtgtaagaacttctacttcaactacaagaagaggcagaacctcgatgagatcttgcagcagcacaagctgaagatggagaaggagaggaacgcgcggaggaagaagaagaaagcgccggcggcggccagcgaggaggctgcattcccgcccgtggtggaggatgaggagatggaggcgtcgggcgtgagcggaaatgaggaggagatggtggaggaggctgaagccttacatgcctctgggaatgaggtgcccagaggggaatgcagtggcccagccactgtcaacaacagctcagacaccgagagcatcccctctcctcacactgaggccgccaaggacacagggcagaatgggcccaagcccccagccaccctgggcgccgacgggccacccccagggccacccaccccaccaccggaggacatcccggcccccactgagcccaccccggcctctgaagccaccggagcccctacgcccccaccagcacccccatcgccctctgcacctcctcctgtggtccccaaggaggagaaggaggaggagaccgcagcagcgcccccagtggaggagggggaggagcagaagccccccgcggctgaggagctggcagtggacacagggaaggccgaggagcccgtcaagagcgagtgcacggaggaagccgaggaggggccggccaagggcaaggacgcggaggccgctgaggccacggccgagggggcgctcaaggcagagaagaaggagggcgggagcggcagggccaccacagccaagagctcgggcgccccccaggacagcgactccagtgctacctgcagtgcagacgaggtggatgaggccgagggcggcgacaagaaccggctgctgtccccaaggcccagcctcctcaccccgactggcgacccccgggccaatgcctcaccccagaagccactggacctgaagcagctgaagcagcgagcggctgccatcccccccatccaggtcaccaaagtccatgagcccccccgggaggacgcagctcccaccaagccagctcccccagccccaccgccaccgcaaaacctgcagccggagagcgacgcccctcagcagcctggcagcagcccccggggcaagagcaggagcccggcaccccccgccgacaaggaggccttcgcagccgaggcccagaagctgcctggggaccccccttgctggacttccggcctgcccttccccgtgcccccccgtgaggtgatcaaggcctccccgcatgccccggacccctcagccttctcctacgctccacctggtcacccactgcccctgggcctccatgacactgcccggcccgtcctgccgcgcccacccaccatctccaacccgcctcccctcatctcctctgccaagcaccccagcgtcctcgagaggcaaataggtgccatctcccaaggaatgtcggtccagctccacgtcccgtactcagagcatgccaaggccccggtgggccctgtcaccatggggctgcccctgcccatggaccccaaaaagctggcacccttcagcggagtgaagcaggagcagctgtccccacggggccaggctgggccaccggagagcctgggggtgcccacagcccaggaggcgtccgtgctgagagggacagctctgggctcagttccgggcggaagcatcaccaaaggcattcccagcacacgggtgccctcggacagcgccatcacataccgcggctccatcacccacggcacgccagctgacgtcctgtacaagggcaccatcaccaggatcatcggcgaggacagcccgagtcgcttggaccgcggccgggaggacagcctgcccaagggccacgtcatctacgaaggcaagaagggccacgtcttgtcctatgagggtggcatgtctgtgacccagtgctccaaggaggacggcagaagcagctcaggacccccccatgagacggccgcccccaagcgcacctatgacatgatggagggccgcgtgggcagagccatctcctcagccagcatcgaaggtctcatgggccgtgccatcccgccggagcgacacagcccccaccacctcaaagagcagcaccacatccgcgggtccatcacacaagggatccctcggtcctacgtggaggcacaggaggactacctgcgtcgggaggccaagctcctaaagcgggagggcacgcctccgcccccaccgccctcacgggacctgaccgaggcctacaagacgcaggccctgggccccctgaagctgaagccggcccatgagggcctggtggccacggtgaaggaggcgggccgctccatccatgagatcccgcgcgaggagctgcggcacacgcccgagctgcccctggccccgcggccgctcaaggagggctccatcacgcagggcaccccgctcaagtacgacaccggcgcgtccaccactggctccaaaaagcacgacgtacgctccctcatcggcagccccggccggacgttcccacccgtgcacccgctggatgtgatggccgacgcccgggcactggaacgtgcctgctacgaggagagcctgaagagccggccagggaccgccagcagctcggggggctccattgcgcgcggcgccccggtcattgtgcctgagctgggtaagccgcggcagagccccctgacctatgaggaccacggggcaccctttgccggccacctcccacgaggttcgcccgtgaccacgcgggagcccacgccgcgcctgcaggagggcagcctttcgtccagcaaggcatcccaggaccgaaagctgacgtcgacgcctcgtgagatcgccaagtccccgcacagcaccgtgcccgagcaccacccacaccccatctcgccctatgagcacctgcttcggggcgtgagtggcgtggacctgtatcgcagccacatccccctggccttcgaccccacctccataccccgcggcatccctctggacgcagccgctgcctactacctgccccgacacctggcccccaaccccacctacccgcacctgtacccaccctacctcatccgcggctaccccgacacggcggcgctggagaaccggcagaccatcatcaatgactacatcacctcgcagcagatgcaccacaacgcggccaccgccatggcccagcgagctgatatgctgaggggcctctcgccccgcgagtcctcgctggcactcaactacgctgcgggtccccgaggcatcatcgacctgtcccaagtgccacacctgcctgtgctcgtgcccccgacaccaggcaccccagccaccgccatggaccgccttgcctacctccccaccgcgccccagcccttcagcagccgccacagcagctccccactctccccaggaggtccaacacacttgacaaaaccaaccaccacgtcctcgtccgagcgggagcgagaccgggatcgagagcgggaccgggatcgggagcgggaaaagtccatcctcacgtccaccacgacggtggagcacgcacccatctggagacctggtacagagcagagcagcggcagcagcggcgggggtgggggcagcagcagccgccccgcctcccactcccatgcccaccagcactcgcccatctcccctcggacccaggatgccctccagcagagacccagtgtgcttcacaacacaggcatgaagggtatcatcaccgctgtggagcccagcacgcccacggtcctgaggtccacctccacctcctcacccgttcgcccggctgccacattcccacctgccacccactgcccactgggcggcaccctcgatggggtctaccctaccctcatggagcccgtcttgctgcccaaggaggccccccgggtcgcccggccagagcggccccgagcagacaccggccatgccttcctcgccaagcccccagcccgctccgggctggagcccgcctcctcccccagcaagggctcggagccccggcccctagtgcctcctgtctctggccacgccaccatcgcccgcacccctgcgaagaacctcgcacctcaccacgccagcccggacccgccggcgccacctgcctcggcctcggacccgcaccgggaaaagactcaaagtaaacccttttccatccaggaactggaactccgttctctgggttaccacggcagcagctacagccccgaaggggtggagcccgtcagccctgtgagctcacccagtctgacccacgacaaggggctccccaagcacctggaagagctcgacaagagccacctggagggggagctgcggcccaagcagccaggccccgtgaagcttggcggggaggccgcccacctcccacacctgcggccgctgcctgagagccagccctcgtccagcccgctgctccagaccgccccaggggtcaaaggtcaccagcgggtggtcaccctggcccagcacatcagtgaggtcatcacacaggactacacccggcaccacccacagcagctcagcgcacccctgcccgcccccctctactccttccctggggccagctgccccgtcctggacctccgccgcccacccagtgacctctacctcccgcccccggaccatggtgccccggcccgtggctccccccacagcgaagggggcaagaggtctccagagccaaacaagacgtcggtcttgggtggtggtgaggacggtattgaacctgtgtccccaccggagggcatgacggagccagggcactcccggagtgctgtgtacccgctgctgtaccgggatggggaacagacggagcccagcaggatgggctccaagtctccaggcaacaccagccagccgccagccttcttcagcaagctgaccgagagcaactccgccatggtcaagtccaagaagcaagagatcaacaagaagctgaacacccacaaccggaatgagcctgaatacaatatcagccagcctgggacggagatcttcaatatgcccgccatcaccggaacaggccttatgacctatagaagccaggcggtgcaggaacatgccagcaccaacatggggctggaggccataattagaaaggcactcatgggtaaatatgaccagtgggaagagtccccgccgctcagcgccaatgcttttaaccctctgaatgccagtgccagcctgcccgctgctatgcccataaccgctgctgacggacggagtgaccacacactcacctcgccaggtggcggcgggaaggccaaggtctctggcagacccagcagccgaaaagccaagtccccggccccgggcctggcatctggggaccggccaccctctgtctcctcagtgcactcggagggagactgcaaccgccggacgccgctcaccaaccgcgtgtgggaggacaggccctcgtccgcaggttccacgccattcccctacaaccccctgatcatgcggctgcaggcgggtgtcatggcttccccacccccaccgggcctccccgcgggcagcgggcccctcgctggcccccaccacgcctgggacgaggagcccaagccactgctctgctcgcagtacgagacactctccgacagcgagtga

SEQ ID NO: 46 - DNA, 1713 bp, Homo sapiens
atggcgttccggggctggaggcccccgccgccaccgctgctcctgctgctgctctgggtgaccgggcaggcagcgcccgtggcgggcctgggctccgacgcggagctgcagatcgagcggcgcttcgtgcccgacgagtgcccgcgcaccgtgcgcagcggcgacttcgtgcgctaccactacgtggggacgttccccgacggccagaagttcgactccagctatgacagagactccactttcaatgtgtttgtgggaaaaggacagctgatcacagggatggaccaggctcttgttgggatgtgcgtaaacgagagacgtttcgtgaagattcccccaaagcttgcctacggaaatgaaggagtttctggtgtgatcccccccaattcagtgcttcattttgatgtacttctgatggatatttggaattctgaagaccaggttcagattcacacctatttcaagcccccgagttgccctcggaccatccaggtgtctgattttgtgaggtaccactacaacgggacgttcctggacggaactctgtttgattcgagtcacaatcgcatgaaaacatatgacacgtatgtgggaattggctggctgattcctggaatggataaagggctgctggggatgtgtgtgggtgagaagcgcatcatcaccattcctccttttctggcctatggagaggatggagatgggaaagacattcccggtcaggcatctctggtgtttgatgttgcattattggacctccataaccccaaggacagcatttccattgagaacaaggtagtacctgaaaactgtgagcggataagtcaaagtggggactttctcaggtatcattacaatggcacgcttctggatggcaccctctttgattccagctactctcggaaccgcacgtttgacacgtacattgggcagggctacgtgattcctgggatggatgaaggtctacttggtgtttgcattggagaaaagcgaaggattgtggtcccgcctcacctggggtatggagaggaaggaagagggaatatccccggctcggctgtgctggtgtttgacatccatgtgatcgacttccacaacccttcggactccatcagcatcacctcccactacaaaccccctgactgctcagtgctgagtaagaagggagattacctcaaatatcactacaatgcctcacttctggatgggaccctgctggactccacgtggaatttaggcaaaacttacaatattgttctgggatctgggcaagttgtgttggggatggacatgggtctcagagagatgtgcgttggcgagaaacggacagtgatcattccgcctcacctgggctatggggaagctggcgtggatggagaagtgcccggcagtgccgtattagtgtttgacattgagctgctggagctggtggctggccttcctgaggggtacatgttcatatggaatggtgaggtgtcacccaacctctttgaagaaattgacaaggatggcaacggagaagtcctcctggaagagttctcagagtacattcacgcccaggtggcatctggcaaagggaaactcgctcctggctttgatgctgagctgattgtgaagaatatgttcaccaaccaggaccggaatggagatgggaaggtcacagccgaggaatttaaactcaaagaccaggaagccaaacacgatgaactctaa

SEQ ID NO: 47 - DNA, 747 bp, Homo sapiens
atggctgcggggatgtatttggaacattatctggacagtattgaaaaccttccctttgaattacagagaaactttcagctcatgagggacctagaccaaagaacagaggacctgaaggctgaaattgacaagttggccactgagtatatgagtagtgcccgcagcctgagctccgaggaaaaattggcccttctcaaacagatccaggaagcctatggcaagtgcaaggaatttggtgacgacaaggtgcagcttgccatgcagacctatgagatggtggacaaacacattcggcggctggacacagacctggcccgttttgaggctgatctcaaggagaaacagattgagtcaagtgactatgacagctcttccagcaaaggcaaaaagagccggactcaaaaggagaagaaagctgctcgtgctcgttccaaagggaaaaactcggatgaagaagcccccaagactgcccagaagaagttaaagctcgtgcgcacaagtcctgagtatgggatgccctcagtgacctttggcagtgtccacccctctgatgtgttggatatgcctgtggatcccaacgaacccacctattgcctttgtcaccaggtctcctatggagagatgattggctgtgacaaccctgattgttccattgagtggttccattttgcctgtgtggggctgacaaccaagcctcgggggaaatggttttgcccacgctgctcccaagaacggaagaagaaatag

SEQ ID NO: 48 - DNA, 3282 bp, Homo sapiens
atgaaggagatggtaggaggctgctgcgtatgttcggacgagaggggctgggccgagaacccgctggtctactgcgatgggcacgcgtgcagcgtggccgtccaccaagcttgctatggcatcgttcaggtgccaacgggaccctggttctgccggaaatgtgaatctcaggagcgagcagccagggtgaggtgtgagctgtgcccacacaaagacggggcattgaagaggactgataatggaggctgggcacacgtggtgtgtgccctctacatccccgaggtgcaatttgccaacgtgctcaccatggagcccatcgtgctgcagtacgtgcctcatgatcgcttcaacaagacctgttacatctgcgaggagcagggccgggagagcaaggcggcctcgggagcctgcatgacctgtaaccgccatggatgtcgacaagctttccacgtcacctgtgcccaaatggcaggcttgctgtgtgaggaagaagtgctggaggtggacaacgtcaagtactgcggctactgcaaataccacttcagcaagatgaagacatcccggcacagcagcgggggaggcggaggaggcgctggaggaggaggtggcagcatggggggaggtggcagtggtttcatctctgggaggagaagccggtcagcctcaccatccacgcagcaggagaagcaccccacccaccacgagaggggccagaagaagagtcgaaaggacaaagaacgccttaagcagaagcacaagaagcggcctgagtcgccccccagcatcctcaccccgcccgtggtccccactgctgacaaggtctcctcctcggcttcctcttcctcccaccacgaggccagcacgcaggagacctctgagagcagcagggagtcaaaggggaaaaagtcttccagccatagcctgagtcataaagggaagaaactgagcagtgggaaaggtgtgagcagttttacctccgcctcctcttcttcctcctcctcttcctcctcctctggggggcccttccagcctgcagtctcgtccctgcagagctcccctgacttctctgcattccccaagctggagcagccagaggaggacaagtactccaagcccacagcccccgccccttcagcccctccttctccctcagctcccgagccccccaaggctgacctttttgagcagaaggtggtcttctctggctttgggcccatcatgcgcttctccaccaccacctccagctcaggccgggcccgggcgccctcccctggggactataagtctccccacgtcacggggtctggggcctcggcaggcacccacaaacggatgcccgcactgagtgccacccctgtgcctgctgatgagacccctgagacaggcctgaaggagaagaagcacaaagccagcaagaggagccgccatgggccaggccgtcccaagggcagccggaacaaggagggcactgggggcccagctgccccatccttgcccagtgcccagctggctggctttaccgccactgctgcctcacccttctctggaggttccctggtcagctccggcctgggaggtctgtcctcccgaacctttgggccttctgggagcttgcccagcttgagcctggagtcccccttactaggggcaggcatctacaccagtaataaggaccccatctcccacagtggcgggatgctgcgggctgtctgcagcacccctctctcctccagcctcctggggcccccagggacctcggccctgccccgcctcagccgctccccgttcaccagcaccctcccctcctcttctgcttctatctccaccactcaggtgttttctctggctggctctacctttagcctcccttctacccacatctttggaacccccatgggtgccgttaatcccctcctctcccaagctgagagcagccacacagagccagacctggaggactgcagcttccggtgtcgggggacctcccctcaggagagtctgtcttccatgtcccccatcagcagcctccccgcactcttcgaccagacagcctctgcaccctgtgggggcggccagttagacccggcggccccagggacgactaacatggagcagcttctggagaagcagggcgacggggaggccggcgtcaacatcgtggagatgctgaaggcgctgcacgcgctgcagaaggagaaccagcggctgcaagagcagatcctgagcctgacggccaaaaaggagcggctgcagattctcaacgtgcagctctctgtgcccttccctgccctgcctgctgccctgcctgccgccaacggccctgtccctgggccctatggcctgcctccccaagccggcagcagcgactccttgagcaccagcaagagccctccgggaaagagcagcctcggcctggacaactcgctgtccacttcttctgaggacccacactcaggctgcccgagccgcagcagctcgtcgctgtccttccacagcacgcccccaccgctgcccctcctccagcagagccctgccactctgcccctggccctgcctggggcccctgccccactcccgccccagccgcagaacgggttgggccgggcacccggggcagcggggctgggggccatgcccatggctgaggggctgttgggggggctggcaggcagtgggggcctgcccctcaatgggctccttggggggttgaatggggccgctgcccccaaccccgcaagcttgagccaggctggcggggcccccacgctgcagctgccaggctgtctcaacagccttacagagcagcagagacatctccttcagcagcaagagcagcagctccagcaactccagcagctcctggcctccccgcagctgaccccggaacaccagactgttgtctaccagatgatccagcagatccagcagaaacgggagctgcagcgcctgcagatggctgggggctcccagctgcccatggccagcctgctggcaggaagctccaccccgctgctgtctgcgggtacccctggcctgctgcccacagcgtctgctccacccctgctgcccgctggagccctagtggctccctcgcttggcaacaacacaagtctcatggccgcagcagctgcagctgcagcagtagcagcagcaggcggacctccagtcctcactgcccagaccaaccccttcctcagcctgtcgggagcagagggcagtggcggtggccccaaaggagggaccgctgacaaaggagcctcagccaaccaggaaaaaggctaa

SEQ ID NO: 49 - DNA, 5250 bp, Homo sapiens
atgcacttgaagcacctgaggaccctgctgagccctcaggatggagctgcaaaggtgacctgcatggcttggtcccagaacaatgccaaatttgctgtctgcacagtggaccgagtggtcttgctgtatgatgaacatggagaacggagagataaattctccaccaaaccagctgacatgaagtatggcaggaagagctatatggtgaagggcatggctttttctcctgattccactaaaattgccataggacagactgacaacatcatctatgtctacaagattggagaagattggggtgacaagaaagtcatctgcaacaagttcatccagacgagtgctgtcacttgtctgcaatggccggcagaatacatcattgtctttggactggctgaagggaaggttcgtttagcaaacaccaaaactaataaatcatctaccatctatgggacagagtcttacgtggtgtccctgacaacaaattgctctgggaaaggaattctctctggtcatgcagatggtaccatcgttaggtatttctttgatgatgaaggctctggagagtcacaggggaagttggttaaccacccgtgtccaccctatgccttggcatgggcaaccaatagcatcgtggctgcaggctgtgatcggaaaattgtagcctatggaaaagaaggtcacatgctacaaacttttgattatagccgtgaccctcaggagcgggagttcaccacagctgtatcaagtcctgggggccagtctgttgtgctaggaagttatgacaggcttcgggtgttcaactggatccctcgaagaagcatctgggaagaggcaaagcccaaggagattaccaatttatacaccatcactgccttggcctggaagcgggatggctcacggctctgtgtgggcacactatgtggtggggtggaacagtttgactgctgcctccgaaggagtatttacaagaacaagtttgagttgacgtatgtgggacctagccaggtgattgtgaagaacctgtcatcaggaacccgagtggtgctcaagtcacactatggctatgaggtggaagaggtgaaaatcctaggaaaggaacgttacttggtggctcacacatcagaaacactgctgctgggggacctgaacactaatcggcttagtgagatagcctggcaaggatctggtggcaatgagaagtatttctttgaaaatgagaatgtatgcatgatcttcaatgccggagagctaaccctggtggaatatgggaataatgacaccctgggttctgtacgcactgaattcatgaacccccacctcatcagtgttcgtattaatgagaggtgtcagcgaggaacagaagataataagaaattggcttatcttattgatattaagactattgctatagtggatctgattggtggctacaacattggcaccgtcagccatgagagccgtgtggattggctggaacttaatgagactggacacaagctcctcttcagggaccggaaacttcgtttgcatctgtatgatattgaaagctgctctaagacaatgatcctcaacttctgctcctatatgcagtgggtcccaggaagtgacgtgctggtagctcagaaccgaaacagtctgtgtgtatggtacaacattgaggcacctgagagagtcaccatgttcactattaggggtgatgttataggtctggagcggggcgggggaaagaccgaggtgatggtgatggaaggtgtgactactgttgcctacacattggatgagggcctcatcgagtttggaacagccattgatgatggcaactacatccgggcaacagccttcttagagactctggaaatgaccccagaaacagaggcaatgtggaaaaccttgagtaaactggcactagaggcaaggcaactacacattgcggagaggtgcttttctgctttgggccaagtagcaaaagctcgattcctgcatgagaccaatgagattgcagatcaagtatcccgggaatatggcggagaaggaacagacttttatcaggtccgagcacgtctagccatgctggaaaagaactacaaactggctgaaatgatctttttggaacagaatgctgtggaggaggccatgggcatgtaccaggagctacaccgttgggatgagtgtatcgctgtggctgaagccaaggggcacccagccctggagaagctacgtcgtagttactaccagtggctgatggacacacagcaagaggagcgagcaggtgaactacaggagagccaaggggatgggctagcagccatcagcctctacctcaaagctgggctccctgccaaagctgctcggctggtgctgacccgagaggaactgctagccaacacagagctggtagaacacatcactgcagcccttatcaagggggaactctacgaaagggcaggtgatctctttgagaagattcacaatccacagaaggccctggagtgctaccgtaaaggcaacgcattcatgaaagcggtagagctggctcgattggccttcccagtggaggtggtgaaactagaggaggcatggggggaccacctggtgcagcagaagcagcttgatgcagccattaatcactacatcgaagccaggtgctccattaaggcaattgaggccgccctgggtgcccgccagtggaagaaggcaatttatatattagatctacaggaccggaacactgcatccaaatactatcctctcgtggcccaacactatgcatccctgcaggagtatgagattgctgaggagctctatactaagggagatcggacaaaagatgccatagacatgtacacccaggctggtcgttgggaacaagcccacaagctggcgatgaaatgcatgagaccagaagatgtgtcagtgctatacatcactcaggcccaggaaatggagaagcagggcaagtaccgtgaggctgaaaggctatatgtgacagtacaagagcctgatcttgccatcaccatgtacaaaaagcacaagttgtatgatgacatgatccgcctggtagggaagcaccatccagatctcctcagtgatacacacctacatctgggcaaggagctggaggctgaaggccgactacaggaggctgagtaccactacctcgaggcccaggaatggaaggcaacagtgaacatgtaccgggccagtgggctttgggaagaggcctacagggtggccagaactcaaggaggggctaatgcccacaaacacgtggcctatctgtgggcaaagagcctgggaggagaggctgcagttagactgcttaataagctgggactcctggaagctgctgttgaccacgctgcagacaattgctcctttgaatttgcgtttgaactctctcggctggccctcaagcacaaaacccccgaggttcatctcaaatatgctatgttcctggaggatgagggtaaattcgaagaggctgaagctgaattcatcagagctggtaaacccaaggaggcagtcctcatgtttgtccataaccaggattgggaggcagctcagcgtgtggctgaggctcacgaccctgacagtgtcgccgaggtgcttgtgggacaggcccggggggccttggaggagaaggactttcagaaagcagaagggctgctgctccgggcccagagaccaggcctggccctcaattattataaggaggctggattatggagtgacgctctgcgcatctgcaaggactatgtgcccagccagctggaggctctgcaggaagaatatgagcgggaagctactaagaagggggccaggggtgtggagggatttgtggaacaagctcgacactgggagcaggctggagagtacagccgtgccgtggactgctacctcaaagtgcgagactctggaaacagcggcctggcggagaagtgctggatgaaggcagctgaactctccatcaagtttctgcctccccaacgtaatatggaagtcgttctggctgtaggaccccagctgattggaattggaaagcacagtgcagctgcagagctctatctgaatctggaccttgtcaaggaagcaatcgatgctttcatcgagggtgaggagtggaacaaggcgaagcgtgtagctaaggagttagatcccaggtatgaagactatgtggaccagcattataaagagttcctcaagaatcagggcaaagtggactcgctggtgggtgtggatgtgatagctgctttggacctgtatgtggagcagggccagtgggacaagtgcattgaaacagctaccaagcagaactacaagattctgcacaagtatgtggctttgtatgcaactcacttgatccgggagggtagctctgcccaggcattggccctgtatgtacagcacggagcccctgctaacccacagaacttcaatatctacaaaaggatcttcactgacatggtgagctctcctggaaccaactgtgccgaggcctatcatagctgggctgatcttcgagatgtcctcttcaacctgtgtgaaaacctggtgaagtccagtgaggcaaactctccagcccatgaggagttcaagacgatgctgctgatcgctcattactatgccacgcgctctgcagcccagagtgtcaaacagctggaaaccgtggctgccaggctttctgtttcactcttgcgtcacacccagctactacctgtagacaaagccttctatgaagcaggcattgctgccaaggcagttggctgggataacatggcattcatcttcctcaatcgctttttggacctgaccgatgcaatcgaggaagggactctagatggccttgaccactctgattttcaggatacagacattccctttgaggtgccactcccagctaagcagcatgtaccggaggctgagagagaagaggttcgagactgggtgcttacagtctccatggaccagcggctggagcaggttctgcctcgggatgagcgtggcgcctacgaggcctccctagtggcagcgagcactggtgttcgagccctgccctgccttattacaggataccccattctgaggaacaaaattgaatttaagcggccagggaaggctgctaacaaggacaactggaataaattccttatggccatcaagacctcccacagcccagtgtgccaggacgtgctgaaattcatcagtcagtggtgtggagggctccccagcaccagcttttcctttcagtag

SEQ ID NO: 50 - DNA, 2070 bp, Homo sapiens
atggcggcgcgcaccctgggccgcggcgtcgggaggctgctgggcagcctgcgagggctctcggggcagcccgcgcggccgccgtgcggggtgagcgcgccgcgcagggcggcctcgggaccctcgggcagcgctcccgcagttgcagcagcagcagcacagccaggctcgtatcccgcgctgagtgcacaggcagcccgggagccggccgccttctgggggcctctggcgcgggacactctcgtgtgggacaccccctaccacaccgtctgggactgcgacttcagcactggcaagatcggctggttcctgggaggccagttaaatgtctctgtcaactgcttggaccagcatgttcggaagtcccccgagagcgttgctttgatctgggagcgcgatgagcctggaacggaagtgaggatcacctacagggaactactggagaccacgtgccgcctggccaacacgctgaagaggcatggagtccaccgtggggaccgtgttgccatctacatgcccgtgtccccattggctgtggcagcaatgctggcctgtgccaggatcggagctgtccacacagtcatctttgctggcttcagtgcagagtccttggctgggaggatcaatgatgccaagtgcaaggtggttatcaccttcaaccaaggactccggggtgggcgcgtggtggagctgaagaaaatagtggatgaggctgtgaagcactgccccaccgtgcagcatgtcctggtggctcacaggacagacaacaaggtccacatgggggatctggacgtcccgctggagcaggaaatggccaaggaggaccctgtttgcgccccagagagcatgggcagtgaggacatgctcttcatgctgtacacctcagggagcaccggaatgcccaagggcatcgtccatacccaggcaggctacctgctctatgccgccctgactcacaagcttgtgtttgaccaccagccaggtgacatctttggctgtgtggccgacatcggttggattacaggacacagctacgtggtgtatgggcctctctgcaatggtgccaccagcgtcctttttgagagcaccccagtttatcccaatgctggtcggtactgggagacagtagagaggttgaagatcaatcagttctatggcgccccaacggctgtccggctgttgctgaaatacggtgatgcctgggtgaagaagtatgatcgctcctccctgcggaccctggggtcagtgggagagcccatcaactgtgaggcctgggagtggcttcacagggtggtgggggacagcaggtgcacgctggtggacacctggtggcagacagaaacaggtggcatctgcatcgcaccacggccctcggaagaaggggcggaaatcctccctgccatggcgatgaggcccttctttggcatcgtccccgtcctcatggatgagaagggcagcgtcgtggagggcagcaacgtctccggggccctgtgcatctcccaggcctggccgggcatggccaggaccatctatggcgaccaccagcgatttgtggacgcctacttcaaggcctacccaggctattacttcactggagacggggcttaccgaactgagggcggctattaccagatcacagggcggatggatgatgtcatcaacatcagtggccaccggctggggaccgcagagattgaggacgccatcgccgaccaccctgcagtaccagaaagtgctgtcattggctacccccacgacatcaaaggagaagctgcctttgccttcattgtggtgaaagatagtgcgggtgactcagatgtggtggtgcaggagctcaagtccatggtggccaccaagatcgccaaatatgctgtgcctgatgagatcctggtggtgaaacgtcttccaaaaaccaggtctgggaaggtcatgcggcggctcctgaggaagatcatcactagtgaggcccaggagctgggagacactaccaccttggaggaccccagcatcatcgcagagatcctgagtgtctaccagaagtgcaaggacaagcaggctgctgctaagtga

SEQ ID NO: 51 - DNA, 1434 bp, Homo sapiens
atggaggctgtggaactcgccagaaaactgcaggaggaagctacgtgctccatctgtctggattacttcacagaccctgtgatgaccacctgtggccacaacttctgccgagcctgcatccagctgagctgggaaaaggcgaggggcaagaaggggaggcggaagcggaagggctccttcccctgccccgagtgcagagagatgtccccgcagaggaacctgctgcccaaccggctgctgaccaaggtggccgagatggcgcagcagcatcctggtctgcagaagcaagacctgtgccaggagcaccacgagcccctcaagcttttctgccagaaggaccagagccccatctgtgtggtgtgcagggagtcccgggagcaccggctgcacagggtgctgcccgccgaggaggcagtgcaggggtacaagttgaagctggaggaggacatggagtaccttcgggagcagatcaccaggacagggaatctgcaggccagggaggagcagagcttagccgagtggcagggcaaggtgaaggagcggagagaacgcattgtgctggagtttgagaagatgaacctctacctggtggaagaagagcagaggctcctccaggctctggagacggaagaagaggagactgccagcaggctccgggagagcgtggcctgcctggaccggcagggtcactctctggagctgctgctgctgcagctggaggagcggagcacacaggggcccctccagatgctgcaggacatgaaggaacccctgagcaggaagaacaacgtgagtgtgcagtgcccagaggttgcccccccaaccagacccaggactgtgtgcagagttcccggacagattgaagtgctaagaggctttctagaggatgtggtgcctgatgccacctccgcgtacccctacctcctcctgtatgagagccgccagaggcgctacctcggctcttcgccggagggcagtgggttctgcagcaaggaccgatttgtggcttacccctgtgctgtgggccagacggccttctcctctgggaggcactactgggaggtgggcatgaacatcaccggggacgcgttgtgggccctgggtgtgtgcagggacaacgtgagccggaaagacagggtccccaagtgccccgaaaacggcttctgggtggtgcagctgtccaaggggaccaagtacttatccaccttctctgccctaaccccggtcatgctgatggagcctcccagccacatgggcatcttcctggacttcgaagccggggaagtgtccttctacagtgtaagcgatgggtcccacctgcacacctactcccaggccaccttcccaggccccctgcagcctttcttctgcctgggggctccgaagtctggtcagatggtcatctccacagtgaccatgtgggtgaaaggatag

SEQ ID NO: 52 - DNA, 2982 bp, Homo sapiens
atgggctcggggcgcgtacccgggctctgcctgcttgtcctgctggtccacgcccgcgccgcccagtacagcaaagccgcgcaagatgtggatgagtgtgtggaggggactgacaactgccacatcgatgctatctgccagaacaccccgaggtcatacaagtgcatctgcaagtctggctacacaggggacggcaaacactgcaaagacgtggatgagtgcgagcgagaggataatgcaggttgtgtgcatgactgtgtcaacatccctggcaattaccggtgtacctgctatgatggattccacctggcacatgacggacacaactgtctggatgtggacgagtgtgccgagggcaacggcggctgtcagcagagctgtgtcaacatgatgggcagctatgagtgccactgccgggaaggcttcttcctcagcgacaaccagcatacctgtatccagcggccagaagaaggaatgaattgcatgaacaagaaccacggctgtgcccacatttgccgggagacacccaaggggggtattgcctgtgaatgccgtcctggctttgagcttaccaagaaccaacgggactgtaaattgacatgcaactatggtaacggcggctgccagcacacgtgtgatgacacagagcagggtccccggtgcggctgccatatcaagtttgtgctccataccgacgggaagacatgcatcgagacctgtgctgtcaacaacgggggctgtgacagtaagtgccatgatgcagcgactggtgtccactgcacctgccctgtgggcttcatgctgcagccagacaggaagacgtgcaaagatatagatgagtgccgcttaaacaacgggggctgtgaccatatttgccgcaacacagtgggcagcttcgaatgcagttgcaagaaaggctataagcttctcatcaatgagaggaactgccaggatatagacgagtgttcctttgatcgaacctgtgaccacatatgtgtcaacacaccaggaagcttccagtgtctctgccatcgtggctacctgttgtatggtatcacccactgtggggatgtggatgaatgcagcatcaaccggggaggttgccgctttggctgcatcaacactcctggcagctaccagtgtacctgcccagcaggccagggtcggctgcactggaatggcaaagattgcacagagccactgaagtgtcagggcagtcctggggcctcgaaagccatgctcagctgcaaccggtctggcaagaaggacacctgtgccctgacctgtccctccagggcccgatttttgccagagtctgagaatggcttcacggtgagctgtgggacccccagccccagggctgctccagcccgagctggccacaatgggaacagcaccaactccaaccactgccatgaggctgcagtgctgtccattaaacaacgggcctccttcaagatcaaggatgccaaatgccgtttgcacctgcgaaacaaaggcaaaacagaggaggctggcagaatcacagggccaggtggtgccccctgctctgaatgccaggtcaccttcatccaccttaagtgtgactcctctcggaagggcaagggccgacgggcccggacccctccaggcaaagaggtcacaaggctcaccctggaactggaggcagaggtcagagccgaagaaaccacagccagctgtgggctgccctgcctccgacagcgaatggaacggcggctgaaaggatccctgaagatgctcagaaagtccatcaaccaggaccgcttcctgctgcgcctggcaggccttgattatgagctggcccacaagccgggcctggtagccggggagcgagcagagccgatggagtcctgtaggcccgggcagcaccgtgctgggaccaagtgtgtcagctgcccgcagggaacgtattaccacggccagacggagcagtgtgtgccatgcccagcgggcaccttccaggagagagaagggcagctctcctgcgacctttgccctgggagtgatgcccacgggcctcttggagccaccaacgtcaccacgtgtgcaggtcagtgcccacctggccaacactctgtagatgggttcaagccctgtcagccatgcccacgtggcacctaccaacctgaagcaggacggaccctatgcttcccttgtggtgggggcctcaccaccaagcatgaaggggccatttccttccaagactgtgacaccaaagtccagtgctccccagggcactactacaacaccagcatccaccgctgtattcgctgtgccatgggctcctatcagcccgacttccgtcagaacttctgcagccgctgtccaggaaacacaagcacagactttgatggctctaccagtgtggcccaatgcaagaatcgtcagtgtggtggggagctgggtgagttcactggctatattgagtcccccaactacccgggcaactacccagctggtgtggagtgcatctggaacatcaaccccccacccaagcgcaagatccttatcgtggtaccagagatcttcctgccatctgaggatgagtgtggggacgtcctcgtcatgagaaagaactcatccccatcctccattaccacttatgagacctgccagacctacgagcgtcccattgccttcactgcccgttccaggaagctctggatcaacttcaagacaagcgaggccaacagcgcccgtggcttccagattccctatgttacctatgatgaggactatgagcagctggtagaagacattgtgcgagatggccggctctatgcctctgaaaaccaccaggagattttaaaggacaagaagctcatcaaggccttctttgaggtgctagcccacccccagaactacttcaagtacacagagaaacacaaggagatgctgccaaaatccttcatcaagctgctccgctccaaagtttccagcttcctgaggccctacaaatag

SEQ ID NO: 53 - DNA, 1332 bp, Homo sapiens
atgggcggcccgcgggcttgggcgctgctctgcctcgggctcctgctcccgggaggcggcgctgcgtggagcatcggggcagctccgttctccggacgcaggaactggtgctcctatgtggtgacccgcaccatctcatgccatgtgcagaatggcacctaccttcagcgagtgctgcagaactgcccctggcccatgagctgtccggggagcagctacagaactgtggtgagacccacatacaaggtgatgtacaagatagtgaccgcccgtgagtggaggtgctgccctgggcactcaggagtgagctgcgaggaagttgcagcttcctctgcctccttggagcccatgtggtcgggcagtaccatgcggcggatggcgcttcggcccacagccttctcaggttgtctcaactgcagcaaagtgtcagagctgacagagcggctgaaggtgctggaggccaagatgaccatgctgactgtcatagagcagccagtacctccaacaccagctacccctgaggaccctgccccgctctggggtccccctcctgcccagggcagccccggagatggaggcctccaggaccaagtcggtgcttgggggcttcccgggcccaccggccccaagggagatgccggcagtcggggcccaatggggatgagaggcccaccaggtccacagggccccccagggagccctggccgggctggagctgtgggcacccctggagagaggggacctcctgggccaccagggcctcctggcccccctgggcccccagcccctgttgggccaccccatgcccggatctcccagcatggagacccattgctgtccaacaccttcactgagaccaacaaccactggccccagggacccactgggcctccaggccctccagggcccatgggtccccctgggcctcctggccccacaggtgtccctgggagtcctggtcacataggacccccaggccccactggacccaaaggaatctctggccacccaggagagaagggcgagagaggactgcgtggggagcctggcccccaaggctctgctgggcagcggggggaacctggccctaagggagaccctggtgagaagagccactggggggaggggttgcaccagctacgcgaggctttgaagattttagctgagagggttttaatcttggaaacaatgattgggctctatgaaccagagctggggtctggggcgggccctgccggcacaggcacccccagcctccttcggggcaagaggggcggacatgcaaccaactaccggatcgtggcccccaggagccgggacgagagaggctga

SEQ ID NO: 54 - DNA, 2151 bp, Homo sapiens
atggagcgcacagcaggcaaagagctggccctggcaccgctgcaggactggggtgaagagaccgaggacggcgcggtgtacagtgtctccctgcggcggcagcgcagtcagcgcaggagcccggcggagggccccgggggcagccaggctcccagccccattgccaataccttcctccactatcgaaccagcaaggtgagggtgctgagggcagcgcgcctggagcggctggtgggagagttggtgtttggagaccgtgagcaggaccccagcttcatgcccgccttcctggccacctaccggacctttgtacccactgcctgcctgctgggctttctgctgccaccaatgccaccgcccccacctcccggggtagagatcaagaagacagcggtacaagatctgagcttcaacaagaacctgagggctgtggtgtcagtgctgggctcctggctgcaggaccaccctcaggatttccgagaccaccctgcccattcggacctgggcagtgtccgaacctttctgggctgggcggccccagggagtgctgaggctcaaaaagcagagaagcttctggaagattttttggaggaggctgagcgagagcaggaagaggagccgcctcaggtgtggacaggacctcccagagttgcccaaacttctgacccagactcttcagaggcctgcgcggaggaagaggaagggctcatgcctcaaggtccccagctcctggacttcagcgtggacgaggtggccgagcagctgaccctcatagacttggagctcttctccaaggtgaggctctacgagtgcttgggctccgtgtggtcgcagagggaccggccgggggctgcaggcgcctcccccactgtgcgcgccaccgtggcccagttcaacaccgtgaccggctgtgtgctgggttccgtgctcggagcaccgggcttggccgccccgcagagggcgcagcggctggagaagtggatccgcatcgcccagcgctgccgagaactgcggaacttctcctccttgcgcgccatcctgtccgccctgcaatctaaccccatctaccggctcaagcgcagctggggggcagtgagccgggaaccgctatctactttcaggaaactttcgcagattttctccgatgagaacaaccacctcagcagcagagagattcttttccaggaggaggccactgagggatcccaagaagaggacaacaccccaggcagcctgccctcaaaaccacccccaggccctgtcccctaccttggcaccttccttacggacctggttatgctggacacagccctgccggatatgttggagggggatctcattaactttgagaagaggaggaaggagtgggagatcctggcccgcatccagcagctgcagaggcgctgtcagagctacaccctgagcccccacccgcccatcctggctgccctgcatgcccagaaccagctcaccgaggagcagagctaccggctctcccgggtcattgagccaccagctgcctcctgccccagctccccacgcatccgacggcggatcagcctcaccaagcgtctcagtgcgaagcttgcccgagagaaaagctcatcacctagtgggagtcccggggacccctcatcccccacctccagcctctgcatctcccccagtgtgtccccagggtcacccccctcaagtcctagaagcagagatgctcctgctggcagtcccccggcctctccagggccccagggccccagcaccaagctgcccctgagcctggacctgcccagcccccggcccttcgctttgcctctgggcagccctcgaatccccctcccggcgcagcagagctcggaggcccgtgtcatccgcgtcagcatcgacaatgaccacgggaacctgtatcgaagcatcttgctgaccagtcaggacaaagcccccagcgtggtccggcgagccttgcagaagcacaatgtgccccagccctgggcctgtgactatcagctctttcaagtccttcctggggaccgggtgctcctgattcctgacaatgccaacgtcttctatgccatgagtccagtcgcccccagagacttcatgctgcggcggaaagaggggacccggaacactctgtctgtctccccaagctga

SEQ ID NO: 55 - DNA, 582 bp, Homo sapiens
atgctggaagttcacatcccgtcggtggggcccgaggccgaggggcccaggcagagcccggagaaaagccacatggtgttccgagtggaggtgctgtgcagcgggcgcagacacacggtgccaaggcgctacagcgagttccacgcgctgcacaagcggatcaagaagctgtacaaagtgcccgacttcccctcgaaacgcctgcccaactggaggaccagagggttggaacagcgccggcagggcttggaggcttacatccagggcatcctgtacctgaaccaggaggtgcccaaggagttactggaattcctgagacttcggcacttccccacagaccccaaggctagcaactggggcaccctgagggagttcctgcctggcgacagcagctcccagcagcaccagcggcctgtcctgagcttccatgtggatccctatgtttgcaacccctccccagagtcgctgcccaacgtggtggtgaatggtgtgctccagggcctctacagcttcagcatcagcccagataaagcccagccaaaggcggcctgtcaccctgctcctctgccaccgatgccctga

SEQ ID NO: 56 - DNA, 2172 bp, Homo sapiens
atgagcctctccatgagagatccggtcattcctgggacaagcatggcctaccatccgttcctacctcaccgggcgccggacttcgccatgagcgcggtgctgggtcaccagccgccgttcttccccgcgctgacgctgcctcccaacggcgcggcggcgctctcgctgccgggcgccctggccaagccgatcatggatcaattggtgggggcggccgagaccggcatcccgttctcctccctggggccccaggcgcatctgaggcctttgaagaccatggagcccgaagaagaggtggaggacgaccccaaggtgcacctggaggctaaagaactttgggatcagtttcacaagcggggcaccgagatggtcattaccaagtcgggaaggcgaatgtttcctccatttaaagtgagatgttctgggctggataaaaaagccaaatacattttattgatggacattatagctgctgatgactgtcgttataaatttcacaattctcggtggatggtggctggtaaggccgaccccgaaatgccaaagaggatgtacattcacccggacagccccgctactggggaacagtggatgtccaaagtcgtcactttccacaaactgaaactcaccaacaacatttcagacaaacatggatttactatattgaactccatgcacaaataccagccccggttccacattgtaagagccaatgacatcttgaaactcccttatagtacatttcggacatacttgttccccgaaactgaattcatcgctgtgactgcataccagaatgataagataacccagttaaaaatagacaacaacccttttgcaaaaggtttccgggacactggaaatggccgaagagaaaaaagaaaacagctcaccctgcagtccatgagggtgtttgatgaaagacacaaaaaggagaatgggacctctgatgagtcctccagtgaacaagcagctttcaactgcttcgcccaggcttcttctccagccgcctccactgtagggacatcgaacctcaaagatttatgtcccagcgagggtgagagcgacgccgaggccgagagcaaagaggagcatggccccgaggcctgcgacgcggccaagatctccaccaccacgtcggaggagccctgccgtgacaagggcagccccgcggtcaaggctcaccttttcgctgctgagcggccccgggacagcgggcggctggacaaagcgtcgcccgactcacgccatagccccgccaccatctcgtccagcactcgcggcctgggcgcggaggagcgcaggagcccggttcgcgagggcacagcgccggccaaggtggaagaggcgcgcgcgctcccgggcaaggaggccttcgcgccgctcacggtgcagacggacgcggccgccgcgcacctggcccagggccccctgcctggcctcggcttcgccccgggcctggcgggccaacagttcttcaacgggcacccgctcttcctgcaccccagccagtttgccatggggggcgccttctccagcatggcggccgctggcatgggtcccctcctggccacggtttctggggcctccaccggtgtctcgggcctggattccacggccatggcctctgccgctgcggcgcagggactgtccggggcgtccgcggccaccctgcccttccacctccagcagcacgtcctggcctctcagggcctggccatgtcccctttcggaagcctgttcccttacccctacacgtacatggccgcagcggcggccgcctcctctgcggcagcctccagctcggtgcaccgccaccccttcctcaatctgaacaccatgcgcccgcggctgcgctacagcccctactccatcccggtgccggtcccggacggcagcagtctgctcaccaccgccctgccctccatggcggcggccgcggggcccctggacggcaaagtcgccgccctggccgccagcccggcctcggtggcagtggactcgggctctgaactcaacagccgctcctccacgctctcctccagctccatgtccttgtcgcccaaactctgcgcggagaaagaggcggccaccagcgaactgcagagcatccagcggttggttagcggcttggaagccaagccggacaggtcccgcagcgcgtccccgtag

SEQ ID NO: 57 - DNA, 4104 bp, Homo sapiens
atgaagtctggctccggaggagggtccccgacctcgctgtgggggctcctgtttctctccgccgcgctctcgctctggccgacgagtggagaaatctgcgggccaggcatcgacatccgcaacgactatcagcagctgaagcgcctggagaactgcacggtgatcgagggctacctccacatcctgctcatctccaaggccgaggactaccgcagctaccgcttccccaagctcacggtcattaccgagtacttgctgctgttccgagtggctggcctcgagagcctcggagacctcttccccaacctcacggtcatccgcggctggaaactcttctacaactacgccctggtcatcttcgagatgaccaatctcaaggatattgggctttacaacctgaggaacattactcggggggccatcaggattgagaaaaatgctgacctctgttacctctccactgtggactggtccctgatcctggatgcggtgtccaataactacattgtggggaataagcccccaaaggaatgtggggacctgtgtccagggaccatggaggagaagccgatgtgtgagaagaccaccatcaacaatgagtacaactaccgctgctggaccacaaaccgctgccagaaaatgtgcccaagcacgtgtgggaagcgggcgtgcaccgagaacaatgagtgctgccaccccgagtgcctgggcagctgcagcgcgcctgacaacgacacggcctgtgtagcttgccgccactactactatgccggtgtctgtgtgcctgcctgcccgcccaacacctacaggtttgagggctggcgctgtgtggaccgtgacttctgcgccaacatcctcagcgccgagagcagcgactccgaggggtttgtgatccacgacggcgagtgcatgcaggagtgcccctcgggcttcatccgcaacggcagccagagcatgtactgcatcccttgtgaaggtccttgcccgaaggtctgtgaggaagaaaagaaaacaaagaccattgattctgttacttctgctcagatgctccaaggatgcaccatcttcaagggcaatttgctcattaacatccgacgggggaataacattgcttcagagctggagaacttcatggggctcatcgaggtggtgacgggctacgtgaagatccgccattctcatgccttggtctccttgtccttcctaaaaaaccttcgcctcatcctaggagaggagcagctagaagggaattactccttctacgtcctcgacaaccagaacttgcagcaactgtgggactgggaccaccgcaacctgaccatcaaagcagggaaaatgtactttgctttcaatcccaaattatgtgtttccgaaatttaccgcatggaggaagtgacggggactaaagggcgccaaagcaaaggggacataaacaccaggaacaacggggagagagcctcctgtgaaagtgacgtcctgcatttcacctccaccaccacgtcgaagaatcgcatcatcataacctggcaccggtaccggccccctgactacagggatctcatcagcttcaccgtttactacaaggaagcaccctttaagaatgtcacagagtatgatgggcaggatgcctgcggctccaacagctggaacatggtggacgtggacctcccgcccaacaaggacgtggagcccggcatcttactacatgggctgaagccctggactcagtacgccgtttacgtcaaggctgtgaccctcaccatggtggagaacgaccatatccgtggggccaagagtgagatcttgtacattcgcaccaatgcttcagttccttccattcccttggacgttctttcagcatcgaactcctcttctcagttaatcgtgaagtggaaccctccctctctgcccaacggcaacctgagttactacattgtgcgctggcagcggcagcctcaggacggctacctttaccggcacaattactgctccaaagacaaaatccccatcaggaagtatgccgacggcaccatcgacattgaggaggtcacagagaaccccaagactgaggtgtgtggtggggagaaagggccttgctgcgcctgccccaaaactgaagccgagaagcaggccgagaaggaggaggctgaataccgcaaagtctttgagaatttcctgcacaactccatcttcgtgcccagacctgaaaggaagcggagagatgtcatgcaagtggccaacaccaccatgtccagccgaagcaggaacaccacggccgcagacacctacaacatcaccgacccggaagagctggagacagagtaccctttctttgagagcagagtggataacaaggagagaactgtcatttctaaccttcggcctttcacattgtaccgcatcgatatccacagctgcaaccacgaggctgagaagctgggctgcagcgcctccaacttcgtctttgcaaggactatgcccgcagaaggagcagatgacattcctgggccagtgacctgggagccaaggcctgaaaactccatctttttaaagtggccggaacctgagaatcccaatggattgattctaatgtatgaaataaaatacggatcacaagttgaggatcagcgagaatgtgtgtccagacaggaatacaggaagtatggaggggccaagctaaaccggctaaacccggggaactacacagcccggattcaggccacatctctctctgggaatgggtcgtggacagatcctgtgttcttctatgtccaggccaaaacaggatatgaaaacttcatccatctgatcatcgctctgcccgtcgctgtcctgttgatcgtgggagggttggtgattatgctgtacgtcttccatagaaagagaaataacagcaggctggggaatggagtgctgtatgcctctgtgaacccggagtacttcagcgctgctgatgtgtacgttcctgatgagtgggaggtggctcgggagaagatcaccatgagccgggaacttgggcaggggtcgtttgggatggtctatgaaggagttgccaagggtgtggtgaaagatgaacctgaaaccagagtggccattaaaacagtgaacgaggccgcaagcatgcgtgagaggattgagtttctcaacgaagcttctgtgatgaaggagttcaattgtcaccatgtggtgcgattgctgggtgtggtgtcccaaggccagccaacactggtcatcatggaactgatgacacggggcgatctcaaaagttatctccggtctctgaggccagaaatggagaataatccagtcctagcacctccaagcctgagcaagatgattcagatggccggagagattgcagacggcatggcatacctcaacgccaataagttcgtccacagagaccttgctgcccggaattgcatggtagccgaagatttcacagtcaaaatcggagattttggtatgacgcgagatatctatgagacagactattaccggaaaggagggaaagggctgctgcccgtgcgctggatgtctcctgagtccctcaaggatggagtcttcaccacttactcggacgtctggtccttcggggtcgtcctctgggagatcgccacactggccgagcagccctaccagggcttgtccaacgagcaagtccttcgcttcgtcatggagggcggccttctggacaagccagacaactgtcctgacatgctgtttgaactgatgcgcatgtgctggcagtataaccccaagatgaggccttccttcctggagatcatcagcagcatcaaagaggagatggagcctggcttccgggaggtctccttctactacagcgaggagaacaagctgcccgagccggaggagctggacctggagccagagaacatggagagcgtccccctggacccctcggcctcctcgtcctccctgccactgcccgacagacactcaggacacaaggccgagaacggccccggccctggggtgctggtcctccgcgccagcttcgacgagagacagccttacgcccacatgaacgggggccgcaagaacgagcgggccttgccgctgccccagtcttcgacctgctga

SEQ ID NO: 58 - DNA, 684 bp, Homo sapiens
atgggtcggcccctgctgctgcccctgctgctcctgctgcagccgccagcatttctgcagcctggtggctccacaggatctggtccaagctacctttatggggtcactcaaccaaaacacctctcagcctccatgggtggctctgtggaaatccccttctccttctattacccctgggagttagccatagttcccaacgtgagaatatcctggagacggggccacttccacgggcagtccttctacagcacaaggccgccttccattcacaaggattatgtgaaccggctctttctgaactggacagagggtcaggagagcggcttcctcaggatctcaaacctgcggaaggaggaccagtctgtgtatttctgccgagtcgagctggacacccggagatcagggaggcagcagttgcagtccatcaaggggaccaaactcaccatcacccaggctgtcacaaccaccaccacctggaggcccagcagcacaaccaccatagccggcctcagggtcacagaaagcaaagggcactcagaatcatggcacctaagtctggacactgccatcagggttgcattggctgtcgctgtgctcaaaactgtcattttgggactgctgtgcctcctcctcctgtggtggaggagaaggaaaggtagcagggcgccaagcagtgacttctga

SEQ ID NO: 59 - DNA, 2589 bp, Homo sapiens
atgcactcttcttggatccctcgtggaaactacatagaatctaatcgtgatgactgcacggtgtctttgatctatgctgtgcaccttaagaagtcaggctatgtcttctttgagtaccagtatgtcgacaacaacatcttctttgagttctttattcaaaatgatcagtgccaggagatggacaccaccactgacaagtgggtaaaacttacagacaatggagaatggggctctcattctgtaatgctgaaatcaggcacaaacatactctactggagaactacaggcatccttatgggttctaaggcggtcaagcctgtgctggtaaaaaatatcacaattgaaggggtggcgtacacatcagaatgttttccttgcaagccaggcacattcagcaacaaaccaggttcattcaactgccaggtgtgtcccagaaacacctattctgagaaaggagccaaagaatgtataaggtgtaaagacgactctcaattttcagaggaaggatccagtgagtgtacagagcgccctccctgtaccacaaaagactatttccagatccatactccatgtgatgaagaaggaaagacacagataatgtacaagtggatagagcccaaaatctgccgggaggatctcacagatgctattagattgcccccttctggagagaagaaggattgtccgccttgcaaccctggattttataacaatggatcatcttcttgccatccctgtcctcctggaacattttcagatggaaccaaagaatgtagaccatgtccagcaggaacggagcctgcacttggctttgaatataaatggtggaatgtccttcctggcaacatgaaaacttcctgcttcaatgttgggaattcaaagtgcgatggaatgaatggttgggaggtggctggagatcatatccagagtggggctggaggttctgacaatgattacctgatcttaaacttgcatatcccaggatttaaaccaccaacatctatgactggagccacgggttctgaactaggaagaataacatttgtctttgagaccctctgttcagctgactgtgttttgtacttcatggtggatattaatagaaaaagtacaaatgtggtagaatcgtggggtggaaccaaagaaaaacaagcttacacccatatcatcttcaagaatgcaacttttacatttacatgggcattccagagaactaatcagggtcaagataatagacggttcatcaatgacatggtgaagatttattctatcacagccactaatgcagttgatggggtggcgtcctcatgccgtgcctgtgccctcggttctgaacagtcgggttcatcgtgtgtcccctgccctccaggccactacattgagaaagaaaccaaccagtgcaaggaatgtccacctgacacctacctgtccatacatcaggtctatggcaaagaggcttgtattccatgcgggcctgggagtaaaaacaatcaggaccattcggtttgctatagtgactgctttttctaccatgaaaaagaaaatcagagtttgcactatgactttagcaacctcagcagtgtgggctcattaatgaatggccccagcttcacctccaaaggaacaaaatacttccatttcttcaatatcagtttatgtgggcatgaggggaagaagatggctctctgtaccaacaatataacagactttacagtaaaagaaatagtggcagggtcagatgattacacaaatttggtaggggcatttgtatgccagtcaacaattattccttctgaaagtaagggtttccgagcagccttatcatcacaatccatcattctggcagatacattcataggagtcacagttgaaaccacattgaaaaatattaatataaaagaagatatgttcccagttccaacaagccaaataccagatgtgcatttcttttataagtcttctacagcaacaacatcttgtattaatggccgatcaactgctgtgaaaatgaggtgtaatcctactaaatctggagcaggagtgatttcagtccccagcaagtgcccagcaggtacctgtgatgggtgtacgttctatttcctgtgggagagtgctgaagcttgccctctgtgtacggagcatgacttccatgagattgagggagcctgcaagagaggatttcaggaaaccttgtatgtgtggaatgaacctaaatggtgcattaaaggaatttctttgcctgagaaaaagttggcaacctgtgaaacggttgacttttggctgaaggtgggagccggtgtgggagcttttactgccgttttgctggtggctctgacctgctacttctggaaaaagaatcaaaaactggaatacaaatattccaagttagtaatgacgactaactcaaaagagtgtgaactcccggctgcagacagttgtgctatcatggaaggagaagataatgaagaggaagttgtatattccaataaacagtcactactaggaaaactcaaatctttggcaaccaaggaaaaagaagaccattttgaatctgttcaactgaaaacctcaagatccccaaatatatga

SEQ ID NO: 60 - DNA, 1944 bp, Homo sapiens
atggctgaggaggaggcgcctaagaagtcccgggccgccggcggtggcgcgagctgggaactttgtgccggggcgctctcggcccggctggcggaggagggcagcggggacgccggtggccgccgccgcccgccagttgacccccggcgattggcgcgccagctgctgctgctgctttggctgctggaggctccgctgctgctgggggtccgggcccaggcggcgggccaggggccaggccaggggcccgggccggggcagcaaccgccgccgccgcctcagcagcaacagagcgggcagcagtacaacggcgagcggggcatctccgtcccggaccacggctattgccagcccatctccatcccgctgtgcacggacatcgcgtacaaccagaccatcatgcccaacctgctgggccacacgaaccaggaggacgcgggcctggaggtgcaccagttctaccctctagtgaaagtgcagtgttccgctgagctcaagttcttcctgtgctccatgtacgcgcccgtgtgcaccgtgctagagcaggcgctgccgccctgccgctccctgtgcgagcgcgcgcgccagggctgcgaggcgctcatgaacaagttcggcttccagtggccagacacgctcaagtgtgagaagttcccggtgcacggcgccggcgagctgtgcgtgggccagaacacgtccgacaagggcaccccgacgccctcgctgcttccagagttctggaccagcaaccctcagcacggcggcggagggcaccgtggcggcttcccggggggcgccggcgcgtcggagcgaggcaagttctcctgcccgcgcgccctcaaggtgccctcctacctcaactaccacttcctgggggagaaggactgcggcgcaccttgtgagccgaccaaggtgtatgggctcatgtacttcgggcccgaggagctgcgcttctcgcgcacctggattggcatttggtcagtgctgtgctgcgcctccacgctcttcacggtgcttacgtacctggtggacatgcggcgcttcagctacccggagcggcccatcatcttcttgtccggctgttacacggccgtggccgtggcctacatcgccggcttcctcctggaagaccgagtggtgtgtaatgacaagttcgccgaggacggggcacgcactgtggcgcagggcaccaagaaggagggctgcaccatcctcttcatgatgctctacttcttcagcatggccagctccatctggtgggtgatcctgtcgctcacctggttcctggcggctggcatgaagtggggccacgaggccatcgaagccaactcacagtattttcacctggccgcctgggctgtgccggccatcaagaccatcaccatcctggcgctgggccaggtggacggcgatgtgctgagcggagtgtgcttcgtggggcttaacaacgtggacgcgctgcgtggcttcgtgctggcgcccctcttcgtgtacctgtttatcggcacgtcctttctgctggccggctttgtgtcgctcttccgcatccgcaccatcatgaagcacgatggcaccaagaccgagaagctggagaagctcatggtgcgcattggcgtcttcagcgtgctgtacactgtgccagccaccatcgtcatcgcctgctacttctacgagcaggccttccgggaccagtgggaacgcagctgggtggcccagagctgcaagagctacgctatcccctgccctcacctccaggcgggcggaggcgccccgccgcacccgcccatgagcccggacttcacggtcttcatgattaagtaccttatgacgctgatcgtgggcatcacgtcgggcttctggatctggtccggcaagaccctcaactcctggaggaagttctacacgaggctcaccaacagcaaacaaggggagactacagtctga

SEQ ID NO: 61 - DNA, 2277 bp, Homo sapiens
atgagaaaacaaggagtaagctcaaagcggctgcaatcttccggccgcagccagtctaaggggcggcgcggggcctccctcgcccgggagccggaggtagaggaggagatggaaaagtcggccctaggcggcgggaaactgccaaggggctcctggaggtcctccccggggaggatccaaagtctgaaagagcgaaaaggcttggagctagaggtggtggccaagacctttcttctcggccccttccagttcgtccgtaattccctggcgcagctccgggaaaaggtgcaggaactgcaggcgcggcggttctccagcagaaccactctcggcatcgctgtctttgtggcaattttacattggttacatttagtaacactttttgaaaatgatcgtcatttctctcacctctcatctttggaacgggagatgacttttcgcactgaaatgggactttattattcatacttcaagaccattattgaagcaccttcgtttttggaaggactgtggatgattatgaatgacaggcttactgaatatcctcttataattaatgcaataaaacgcttccatctttatccagaggtaatcatagcctcctggtattgcacattcatgggaataatgaatttatttggactagaaactaagacctgctggaatgtcaccagaatagaacctcttaatgaagttcaaagctgtgaaggattgggagatcctgcttgcttttatgttggtgtaatctttattttaaatggactaatgatgggattgttcttcatgtatggagcatacctgagtgggactcaactgggaggtcttattacagtactgtgcttctttttcaaccatggagaggccacccgtgtgatgtggacaccacctctccgtgaaagtttttcctatcctttccttgtacttcagatgtgtattttaactttgattctcaggacctcaagcaatgatagaaggcccttcattgcactctgtctttccaatgttgcttttatgcttccctggcaatttgctcagtttatactttttacacagatagcatcattatttcccatgtatgttgtgggatacattgaaccaagcaaatttcagaagatcatttatatgaacatgatttcagttacccttagtttcattttgatgtttggaaattcaatgtacttatcttcttattattcttcatctttgttaatgacgtgggcaataattctaaagagaaatgaaattcaaaaactgggagtatctaaactcaacttttggctaattcaaggtagtgcctggtggtgtggaacaatcattttgaaatttctgacatctaaaatcttaggcgtttcagaccacattcgcctgagtgatcttatagcagccagaatcttaaggtatacagattttgatactttaatatatacctgtgctcccgaatttgacttcatggaaaaagcgactccgctgagatacacaaagacattattgcttccagttgttatggtgattacatgttttatctttaaaaagactgttcgtgatatttcatatgttttagctacaaacatttatctaagaaaacagctccttgaacacagtgagctggcttttcacacattgcagttgttagtgtttactgcccttgccattttaattatgaggctaaagatgtttttgacaccgcacatgtgtgttatggcttccttgatatgctctcgacagctctttggctggctttttcgcagagttcgttttgagaaggttatctttggcattttaacagtgatgtcaatacaaggttatgcaaacctccgtaatcaatggagcataataggagaatttaataatttgcctcaggaagaacttttacagtggatcaaatacagtaccacatcagatgctgtctttgcaggtgccatgcctacaatggcaagcatcaagctgtctacacttcatcccattgtgaatcatccacattacgaagatgcagacttgagggctcggacaaaaatagtttattctacatatagtcgaaaatctgccaaagaagtaagagataaattgttggagttacatgtgaattattatgttttagaagaggcatggtgtgttgtgagaactaagcctggttgcagtatgcttgaaatctgggatgtggaagacccttccaatgcagctaaccctcccttatgtagcgtcctgctcgaagacgccaggccttacttcaccacagtatttcagaatagtgtgtacagagtattaaaggttaactga

SEQ ID NO: 62 - DNA, 8430 bp, Homo sapiens
atgactctggagggtctgtatttggcaaggggccccctggcccggctcctgctggcctggtcggccctgttgtgcatggcaggtggccaaggccgctgggacggggccttggaggctgcaggtcctggacgtgtgcggaggcggggcagcccaggcatcttgcaggggccgaatgtgtgcggctcccggttccatgcctactgctgtccaggctggaggacattccctggcaggagccagtgtgtcgtacccatctgtaggcgcgcctgcggtgaaggcttctgctcccagcccaacctgtgcacctgtgcggatgggacgctggctcccagctgcggggtgagccgagggtcagggtgcagtgtgagctgtatgaatgggggcacctgccggggggcgtcctgtctgtgtcagaagggctacacaggcaccgtgtgtgggcagcccatctgtgaccgcggctgccacaatgggggtcgctgcattgggcccaaccgctgcgcctgtgtgtatggcttcatgggacctcaatgtgagagagattaccggacgggaccctgctttggccaagtaggccccgaggggtgccagcatcagctgacgggcctcgtgtgcaccaaggcactttgctgtgccactgtgggccgtgcctggggccttccatgtgaactttgccctgcacagccacacccctgccgccgcggcttcatccccaatatccacacgggggcctgccaagatgtggatgagtgccaggctgtgccaggcctgtgccagggaggcagctgcgtcaacatggtgggctccttccattgccgctgtccagttggacaccggctcagtgacagcagcgccgcatgtgaagactaccgggccggcgcctgcttctcagtgcttttcgggggccgctgtgctggagacctcgccggccactacactcgcaggcagtgctgctgtgacaggggcaggtgctgggcagctggcccggtccctgagctgtgtcctcctcggggctccaatgaattccagcaactgtgcgcccagcggctgccgctgctacccggccaccctggcctcttccctggcctcctgggcttcggatccaatggcatgggtccccctcttgggccagcgcgactcaacccccatggctctgatgcgcgtgggatccccagcctgggccctggcaactctaatattggcactgctaccctgaaccagaccattgacatctgccgacacttcaccaacctgtgtctgaatggccgctgcctgcccacgccttccagctaccgctgcgagtgtaacgtgggctacacccaggacgtgcgcggcgagtgcattgatgtagacgaatgcaccagcagcccctgccaccacggtgactgcgtcaacatccccggcacctaccactgccggtgctacccgggcttccaggccacgcccaccaggcaggcatgcgtggatgtggacgagtgcattgtcagtggtggcctttgtcacctgggccgctgtgtcaacacagagggcagcttccagtgtgtctgcaatgcaggcttcgagctcagccctgacggcaagaactgtgtggaccacaacgagtgtgccaccagcaccatgtgcgtcaacggcgtgtgtctcaacgaggatggcagcttctcctgcctctgcaaacccggcttcctgctggcgcctggcggccactactgcatggacattgacgagtgccagacgcccggcatctgcgtgaacggccactgtaccaacaccgagggctccttccgctgccagtgcctgggggggctggcggtaggcacggatggccgcgtgtgcgtggacacccacgtgcgcagcacctgctatggggccatcgagaagggctcctgtgcccgccccttccctggcactgtcaccaagtccgagtgctgctgtgccaatccggaccacggttttggggagccctgccagctttgtcctgccaaagactccgctgagttccaggcactgtgcagcagtgggcttggcattaccacggatggtcgagacatcaacgagtgtgctctggatcctgaggtttgtgccaatggcgtgtgcgagaaccttcggggcagctaccgctgtgtctgcaacctgggttatgaggcaggtgcctcaggcaaggactgcacagacgtggatgagtgtgccctcaacagcctcctgtgtgacaacgggtggtgccagaatagccctggcagctacagctgctcctgcccccccggcttccacttctggcaggacacggagatctgcaaagatgtcgacgaatgcctgtccagcccgtgtgtgagtggcgtctgtcggaacctggccggctcctacacctgcaaatgtggccctggcagccggctggacccctctggtaccttctgtctagacagcaccaagggcacctgctggctgaagatccaggagagccgctgtgaggtgaaccttcagggagccagcctgcggtctgagtgctgcgccaccctcggggcagcctgggggagcccctgcgaacgctgcgagatcgaccctgcctgtgcccggggctttgcccggatgacgggtgtcacctgcgatgatgtgaacgagtgtgagtccttcccgggagtctgtcccaacgggcgttgcgtcaacactgctgggtctttccgctgtgagtgtccagagggcctgatgctggacgcctcaggccggctgtgcgtggatgtgagattggaaccatgtttcctgcgatgggatgaggatgagtgtggggtcaccctgcctggcaagtaccggatggacgtctgctgctgctccatcggggccgtgtggggagtcgagtgcgaggcctgcccggatcccgagtctctggagttcgccagcctgtgcccgcgggggctgggcttcgccagccgggacttcctgtctggccgaccattctataaagatgtgaatgaatgcaaggtgttccctggcctctgcacgcacggtacctgcagaaacacggtgggcagcttccactgcgcctgtgcggggggcttcgccctggatgcccaggaacggaactgcacagatatcgacgagtgtcgcatctctcctgacctctgcggccagggcacctgtgtcaacacgccgggcagctttgagtgcgagtgttttcccggctacgagagtggcttcatgctgatgaagaactgcatggacgtggacgagtgtgcaagggacccgctgctctgccggggaggcacttgcaccaacacggatgggagctacaagtgccagtgtccccctgggcatgagctgacggccaagggcactgcctgtgaggacatcgatgagtgctccctgagtgatggcctgtgtccccatggccagtgtgtcaatgtcatcggtgccttccagtgctcctgccatgccggcttccagagcacacctgaccgccagggctgcgtggacatcaacgaatgccgggtccagaatggtgggtgtgacgtgcactgtattaacactgagggcagctaccggtgcagctgtgggcagggctactcgctgatgcccgacggaagggcatgtgcagacgtggacgagtgtgaagagaacccccgcgtttgtgaccaaggccactgcaccaacatgccagggggtcaccgctgcctgtgctatgatggcttcatggccacgccagacatgaggacatgtgttgatgtggatgagtgtgacctgaaccctcacatctgcctccatggggactgcgagaacacgaagggttcctttgtctgccactgtcagctgggctacatggtcaggaagggggccacaggctgctctgatgtggatgaatgcgaggttggaggacacaactgtgacagtcacgcctcctgtctcaacatcccggggagtttcagctgtaggtgcctgccaggctgggtgggggatggcttcgaatgtcacgacctggatgaatgcgtctcccaggagcaccggtgcagcccaagaggtgactgtctcaatgtccctggctcctaccgctgcacctgccgccagggctttgccggggatggcttcttctgcgaagacagggatgaatgtgccgagaacgtggacctctgtgacaacgggcagtgcctcaatgcgcccggcgggtaccgctgtgaatgtgagatgggctttgaccccaccgaggaccaccgggcctgccaggatgtggacgagtgtgcgcaagggaacctctgtgcatttgggagctgtgagaacctgcctggaatgttccgctgcatctgcaatggtggctacgaactggaccgagggggtggcaactgcacagacatcaacgagtgtgcagacccagtaaactgcatcaacggcgtgtgcattaacacccccggcagctacctctgcagctgcccccaggattttgagctgaaccccagcggagtgggctgcgtggacactcgggccgggaactgtttcctggagacgcatgaccgaggggacagtggcatttcctgcagtgccgagatcggagttggtgtcacccgagcttcctgctgttgctccctgggccgggcttggggcaatccctgtgagctgtgccctatggccaacaccactgagtacagaaccctgtgcccgggtggtgagggcttccagcctaaccgcatcactgtcattctggaagacatcgacgagtgccaagagctgccagggctgtgtcaggggggtgactgcgtcaacacgtttggcagtttccagtgtgagtgcccacctggctaccacctcagtgagcacacccgcatctgtgaggatattgacgaatgctccacacactccggcatctgtggccctggcacctgctacaacaccctggggaactacacctgtgtctgccctgcagagtacctccaagtcaatggtggcaacaactgcatggatatgaggaagagtgtctgcttccggcactataacggcacatgtcaaaatgagctggccttcaacgtgacccggaaaatgtgttgctgctcctacaacattggccaggcctggaatagaccctgtgaggcctgccccactcccatcagtcctgactaccagatcctgtgtggaaatcaggccccgggattcctcactgacatccacacggggaagccccttgacattgatgagtgtggggagatccccgccatctgtgccaatggcatctgcataaaccagatcgggagtttccgctgcgagtgccccgcaggcttcaactacaacagcatcctgctggcttgtgaagatgtcgatgagtgtggcagcagggagagtccctgccagcagaatgctgactgcatcaacatccccggtagctaccgctgcaagtgcacccgagggtacaaactgtcgccaggcggggcttgtgtgggacggaatgagtgtcgggagatcccgaatgtctgtagccatggtgactgcatggacacagaaggcagctacatgtgtctgtgtcaccgtggattccaggcctctgcagaccagaccctgtgcatggacattgacgagtgtgaccggcagccttgtggaaatgggacctgcaagaacatcattggctcctacaactgcctctgcttccctggctttgtggtgacacacaatggggattgtgtggattttgatgagtgtactaccctggtggggcaggtgtgccgatttggccattgcctcaacacagctggttccttccactgcctctgccaggatggctttgagctcacagctgatgggaagaactgtgtggacaccaatgagtgcctcagccttgcaggaacctgcctacccggcacttgccagaacctcgagggctccttccgctgcatctgtccccctggcttccaggtgcagagtgaccactgcattgatatcgacgagtgctcagaggagcccaacctctgcctctttggcacctgtaccaacagccctgggagcttccagtgcctctgcccacctggctttgtcctctctgacaatgggcaccgttgctttgacacacggcagagtttctgcttcacccgttttgaggctgggaagtgctcggtgcccaaagctttcaacaccaccaagacccgctgctgctgcagtaagaggcctggggagggctggggagacccctgcgaactgtgtccccaggagggcagcgctgcctttcaggagctctgcccctttggccacggggcagtcccaggcccggatgactcccgagaagacgtgaatgagtgtgcagagaaccctggcgtctgcactaacggcgtctgtgtcaacaccgatggatccttccgctgtgagtgtccctttggctacagcctggacttcactggcatcaactgtgtggacacagacgagtgctctgtcggccacccctgtgggcaagggacatgcaccaatgtcatcggaggcttcgaatgtgcctgtgctgacggctttgagcctggcctcatgatgacctgcgaggacatcgacgaatgctccctgaacccgctgctctgtgccttccgctgccacaataccgagggctcctacctgtgcacctgtccagccggctacaccctgcgggaggatggggccatgtgtcgagatgtggacgagtgtgcagatggtcagcaggactgccacgcccggggcatggagtgcaagaacctcatcggtaccttcgcgtgcgtctgtcccccaggcatgcggcccctgcctggctctggggagggctgcacagatgacaatgaatgccacgctcagcctgacctctgtgtcaacggccgctgtgtcaacaccgcgggcagcttccggtgcgactgtgatgagggattccagcccagccccacccttaccgagtgccacgacatccggcaggggccctgctttgccgaggtgctgcagaccatgtgccggtctctgtccagcagcagtgaggctgtcaccagggccgagtgctgctgtgggggtggccggggctgggggccccgctgcgagctctgtcccctgcccggcacctctgcctacaggaagctgtgcccccatggctcaggctacactgctgagggccgagatgtagatgaatgccgtatgcttgctcacctgtgtgctcatggggagtgcatcaacagccttggctccttccgctgccactgtcaggccgggtacacaccggatgctactgctactacctgcctggatatggatgagtgcagccaggtccccaagccatgtaccttcctctgcaaaaacacgaagggcagtttcctgtgcagctgtccccgaggctacctgctggaggaggatggcaggacctgcaaagacctggacgaatgcacctcccggcagcacaactgtcagttcctctgtgtcaacactgtgggcgccttcacctgccgctgtccgcccggcttcacccagcaccaccaggcctgcttcgacaatgatgagtgctcagcccagcctggcccatgtggtgcccacgggcactgccacaacaccccgggcagcttccgctgtgaatgccaccaaggcttcaccctggtcagctcaggccatggctgtgaagatgtgaatgaatgtgatgggccccaccgctgccagcatggctgtcagaaccagctagggggctaccgctgcagctgcccccagggtttcacccagcactcccagtgggcccagtgtgtggatgagaatgagtgtgccctgtcgccccccacctgcgggagcgcctcctgtcgcaacactcttggtggcttccgctgcgtctgcccctctggctttgactttgatcaggccctcgggggctgccaggaggtggatgagtgcgccggacggcgtggcccctgtagctacagctgtgccaacacgcctggtggcttcctgtgcggctgtcctcaaggctacttccgggctgggcaagggcactgtgtctccggcctgggcttcagccccggaccccaggacaccccggacaaagaggagctgctctcgtctgaagcctgctacgaatgcaagatcaatggcctctcccctcgggaccggccacgacgcagtgcccacagggaccaccaggtgaacctggccacccttgactccgaggccctgctgaccttgggcctgaacctctcacacctgggccgggccgagcgcatcctggagctccggccggccctggagggtctagagggccggatccgctacgtcatcgtccgcggaaacgagcaaggtttctttcgcatgcatcacctccgtggcgtcagctccctgcagctggggcggaggcggccggggcctggaacctaccggctggaggtggtgagccacatggcaggaccctggggtgtccagccagaggggcagccagggccatggggccaggccttgaggctgaaggtgcagctgcagttgctttag

SEQ ID NO: 63 - DNA, 1086 bp, Homo sapiens
atgggcggtgctgtgagtgctggtgaagacaatgatgagctgatagataatttgaaagaagcacagtatatccggactgagctggtagagcaggctttcagagctatcgatcgtgcagactattatcttgaagaatttaaagaaaatgcttataaagacttggcatggaagcatggaaacattcacctctcagccccgtgcatctactcggaggtgatggaagccctagatctgcagcctggactctcgtttctgaacctgggcagtggcactgggtatctcagctccatggtgggcctcattctaggtccttttggtgtgaaccatggggtggaacttcactcagatgtgatagagtatgcaaagcagaaactggacttcttcatcagaacaagtgatagttttgacaagtttgacttctgtgaaccttcctttgttactgggaattgcctggagatttctccggattgttctcagtatgatcgtgtatactgtggggctggcgtgcagaaagagcatgaagagtacatgaagaatcttctcaaagtgggagggatccttgtcatgccactggaagagaagttgactaagataacacgcacaggtccttcagcttgggaaaccaaaaagattcttgctgtttcttttgctcctctgatccagccctgccattcagagtcaggaaaatcaagacttgtccagttaccaccagtggcagttcgcagcctccaggacttggctcgcatcgccatccggggcaccattaaaaagattattcatcaggaaactgtgagcaaaaacggaaacggactaaagaacacccccaggtttaaacgaaggagagttcgccgccgtcgaatggaaacgattgtctttttggacaaagaagtctttgccagtcggatttccaacccctcagatgacaacagctgtgaagacttggaagaggaacggagggaagaagaagagaagaccccgccggaaacaaagccagaccccccagtgaacttcctacgccagaaggtcctgagcctccctctgccagatcccctgaaatactacttgctttattacagagaaaaataa

SEQ ID NO: 64 - DNA, 3774 bp, Homo sapiens
atggcccatttctccagcgaggaccaggcgatgctgcaggcgatgctgaggcggttgttccagagcgtgaaggagaaaatcacgggtgccccttccctggagtgtgccgaagagattcttttacatctggaggaaactgatgaaaattttcacaactatgaatttgtgaaatacctcaggcagcatataggcaacactttgggttctatgattgaagaagaaatggaaaaatgcacatctgatcggaatcagggtgaagaatgcggctatgatacagttgtacagcaggtcactaaaagaactcaagaatctaaagagtacaaagaaatgatgcattacctgaagaacattatgatagctgtggtcgagtctatgattaacaagtttgaagaagatgagacacgaaatcaagaaaggcagaaaaaaatccaaaaggagaaaagccatagttaccgcacagacaattgctctgatagtgattcatcattgaatcagagttacaaattttgtcaaggaaaattacaattgattttagaccagttggatcctgggcaacctaaagaggtgagatatgaagccttgcaaacattatgttcagctcctccatctgatgtcctcaactgtgaaaattggactactctctgcgaaaaactgaccgtgtctctttcagatcctgatcctgtgtttagtgaccggattttaaaattctgtgcacagacatttttgctttctccattacatatgaccaaggaaatttatacaagcttagctaagtatttggagtcatactttctttctagggaaaatcatattcctactctttcagctggtgtagatataactaatcctaatatgactcgcttacttaaaaaggttcgtcttctaaatgaatatcagaaagaagctccatctttctggattcgtcatccagagaagtatatggaagaaattgtggagagtactttgtccttgttaacagttaaacataatcaaagccatgttgtctcacaaaagattttggatccgatctacttttttgcattagttgataccaaggctgtgtggttcaaaaagtggatgcatgcacattatagcagaactacagtattaagacttcttgaaacgaaatataagtctctggtaactacagccattcaacagtgtgttcagtactttgaaatgtgtaagactaggaaagctgatgaaactttgggacattcaaagcattgcagaaacaagcagaaaactttctactacttaggacaagaattacaatatatttatttcattcactcactgtgccttttaggaagattattgatctataaacaaggcagaaaactatttcctattaagctgaagaataaaaaaggtttggtatccctcatagatctgcttgttctttttacccaacttatctattactcaccaagttgtccaaagatgacatcagctgcccattcagagaattactctcctgcaagtatggtgactgaagttctgtggatactcagtgatcaaaaagaatgtgcagtggaatgcttatataacaacattgtaatagagacacttcttcagcctattcacaatttaatgaaaggaaatgaggcatctccaaattgctctgagacagctttaattcatatagctggtattttggcaagaattgcatctgtagaagaagggcttattttactcctttatggagcaaatatgaactcttctgaagaaagtcctacaggtgctcatataattgcccagttttcgaaaaaacttctcgatgaagatatttctatattttctggatcagaaatgttgcctgtggttaaaggagcttttatttctgtgtgtcgtcacatatatagtacatgtgaaggtttgcaggtgttaatcacttataatttgcatgaatctatagcaaaggcatggaaaaagacaagtttgctatcagaaagaattcctactccagtagagggttctgattctgtttcttcagtaagccaggaatcccaaaacattatggcttgggaagataatttgttagatgatttactacattttgctgccacccccaaaggattactacttcttcaaagaacaggtgctatcaatgaatgtgtgacatttatattcaatcgatatgcaaaaaaattacaggtcagcaggcataaaaaatttggctatggagttttggttacacgagtggcatcaacagcagcaggtggcattgcactaaaaaagtcagggtttattaatgaacttataactgaattatggtccaatctggaatatggaagagatgatgttagggtaacccatcccagaactactccagtggatcctattgaccgaagctgtcaaaagtcttttttagcactggtgaacttgttatcctatcctgctatttatgagcttgtaaggaatcaagatcttcctaataaaacagaatattctcttcgtgaagtcccaacatgtgttattgatattattgatagacttataattttgaattctgaagctaagattcgttctttattcaactatgaacaatcacatatctttggtctaagggactttataattgatggcttatcagtggagagaaatcatgttcttgttagaataaatcttgttggtgggccattggaacggattttgcctccgaggttactcgaaaagagtgataatccatatccttggccaatgttttcatcatatccattgccaaactgctatctgtcagacattacaagaaatgctggtataaaacaagacaatgatcttgacaagcttttattatgcctcaaaatatctgataaacaaactgaatggatagaaaactgccaaagacaattttgcaaaatgatgaaagccaaacctgatataatcagtggagaggccttaatagaattacttgaaaaatttgtgcttcatctcactgaaagcccatctgaatgctacttcccttcagtggagtatacagctactgatgcaaatgtgaagaatgaaagtctttcatctgtgcagcagcttggcattaaaatgactgtcaggtatggcaaattcctcagtctcttaaaagatggtgcagaaaatgatcttacctgggttttaaagcattgtgagagattcctgaaacagcagcaaacttccataaaatcttctcttctctgcctgcaagggaattatgctggccatgactggtttgtatcttctctgttcatgataatgttgggagacaaagaaaaaacattccaatttcttcatcaattctccaggcttctgacttctgcttttctttggttgccaaggctacatatttctagttaccttcctaatgacactgtagaatctggcatccatccagtatatttttgcagcacccattatattgaaatgctactgaaggctgagttgcctcttgtgttttcagcttttcacatgtctggttttgcaccatcacagatttgcctgcaatggataacccagtgtttttggaattacttagattggatagaaatctgccattatattgctacttgtgttttccttggtcctgattatcaagtgtatatctgtatagctgtattcaaacatttacagcaagacattctacagcacactcagactcaagatctgcaagttttcctaaaagaagaagcactgcatgggtttcgagtgagtgattattttgaatacatggaaattttggaacaaaactaccgaacagtgctgctgagagacatgcggaacattagactgcagagcacatag

SEQ ID NO: 65 - DNA, 819 bp, Homo sapiens
atggccaccactggggccctgggcaactactacgtggactcgttcctgctgggcgccgacgccgcggatgagctgagcgttggccgctatgcgccggggaccctgggccagcctccccggcaggcggcgacgctggccgagcaccccgacttcagcccgtgcagcttccagtccaaggcgacggtgtttggcgcctcgtggaacccagtgcacgcggcgggcgccaacgctgtacccgctgcggtgtaccaccaccatcaccaccacccctacgtgcacccccaggcgcccgtggcggcggcggcgccggacggcaggtacatgcgctcctggctggagcccacgcccggtgcgctctccttcgcgggcttgccctccagccggccttatggcattaaacctgaaccgctgtcggccagaaggggtgactgtcccacgcttgacactcacactttgtccctgactgactatgcttgtggttctcctccagttgatagagaaaaacaacccagcgaaggcgccttctctgaaaacaatgctgagaatgagagcggcggagacaagccccccatcgatcccaataacccagcagccaactggcttcatgcgcgctccactcggaaaaagcggtgcccctatacaaaacaccagaccctggaactggagaaagagtttctgttcaacatgtacctcaccagggaccgcaggtacgaggtggctcgactgctcaacctcaccgagaggcaggtcaagatctggttccagaaccgcaggatgaaaatgaagaaaatcaacaaagaccgagcaaaagacgagtga

SEQ ID NO: 66 - DNA, 1050 bp, Homo sapiens
atggcgggtgggcgctgcggcccgcagctaacggcgctcctggccgcctggatcgcggctgtggcggcgacggcaggccccgaggaggccgcgctgccgccggagcagagccgggtccagcccatgaccgcctccaactggacgctggtgatggagggcgagtggatgctgaaattttacgccccatggtgtccatcctgccagcagactgattcagaatgggaggcttttgcaaagaatggtgaaatacttcagatcagtgtggggaaggtagatgtcattcaagaaccaggtttgagtggccgcttctttgtcaccactctcccagcattttttcatgcaaaggatgggatattccgccgttatcgtggcccaggaatcttcgaagacctgcagaattatatcttagagaagaaatggcaatcagtcgagcctctgactggctggaaatccccggcttctctaacgatgtctggaatggctggtctttttagcatctctggcaagatatggcatcttcacaactatttcacagtgactcttggaattcctgcttggtgttcttatgtctttttcgtcatagccaccttggtttttggcctttttatgggtctggtcttggtggtaatatcagaatgtttctatgtgccacttccaaggcatttatctgagcgttctgagcagaatcggagatcagaggaggctcatagagctgaacagttgcaggatgcggaggaggaaaaagatgattcaaatgaagaagaaaacaaagacagccttgtagatgatgaagaagagaaagaagatcttggcgatgaggatgaagcagaggaagaagaggaggaggacaacttggctgctggtgtggatgaggagagaagtgaggccaatgatcaggggcccccaggagaggacggtgtgacccgggaggaagtagagcctgaggaggctgaagaaggcatctctgagcaaccctgcccagctgacacagaggtggtggaagactccttgaggcagcgtaaaagtcagcatgctgacaagggactgtag

SEQ ID NO: 67 - DNA, 1284 bp, Homo sapiens
atgggggcaggtgccaccggccgcgccatggacgggccgcgcctgctgctgttgctgcttctgggggtgtcccttggaggtgccaaggaggcatgccccacaggcctgtacacacacagcggtgagtgctgcaaagcctgcaacctgggcgagggtgtggcccagccttgtggagccaaccagaccgtgtgtgagccctgcctggacagcgtgacgttctccgacgtggtgagcgcgaccgagccgtgcaagccgtgcaccgagtgcgtggggctccagagcatgtcggcgccgtgcgtggaggccgacgacgccgtgtgccgctgcgcctacggctactaccaggatgagacgactgggcgctgcgaggcgtgccgcgtgtgcgaggcgggctcgggcctcgtgttctcctgccaggacaagcagaacaccgtgtgcgaggagtgccccgacggcacgtattccgacgaggccaaccacgtggacccgtgcctgccctgcaccgtgtgcgaggacaccgagcgccagctccgcgagtgcacacgctgggccgacgccgagtgcgaggagatccctggccgttggattacacggtccacacccccagagggctcggacagcacagcccccagcacccaggagcctgaggcacctccagaacaagacctcatagccagcacggtggcaggtgtggtgaccacagtgatgggcagctcccagcccgtggtgacccgaggcaccaccgacaacctcatccctgtctattgctccatcctggctgctgtggttgtgggccttgtggcctacatagccttcaagaggtggaacagctgcaagcagaacaagcaaggagccaacagccggccagtgaaccagacgcccccaccagagggagaaaaactccacagcgacagtggcatctccgtggacagccagagcctgcatgaccagcagccccacacgcagacagcctcgggccaggccctcaagggtgacggaggcctctacagcagcctgcccccagccaagcgggaggaggtggagaagcttctcaacggctctgcgggggacacctggcggcacctggcgggcgagctgggctaccagcccgagcacatagactcctttacccatgaggcctgccccgttcgcgccctgcttgcaagctgggccacccaggacagcgccacactggacgccctcctggccgccctgcgccgcatccagcgagccgacctcgtggagagtctgtgcagtgagtccactgccacatccccggtgtga

SEQ ID NO: 68 - DNA, 1167 bp, Homo sapiens
atgcgcgcccgccgggggctgctgcggctgccgcgccgctcgctgctcgccgcgctcttcttcttttctctctcgtcctcgctgctgtacttcgtctatgtggcgcccggcatagtgaacacctacctcttcatgatgcaagcccaaggcattctgatccgggacaacgtgagaacaatcggtgctcaggtttatgagcaggtgcttcggagtgcttatgccaagaggaacagcagtgtaaatgactcagattatcctcttgacttgaaccacagtgaaaccttcctgcaaactacaacatttcttcctgaagacttcacctactttgcaaaccatacctgccctgaaagactcccttccatgaagggcccaatagacataaacatgagtgaaattggaatggattacattcatgaactcttctccaaagacccaaccatcaagctcggaggtcactggaagccttctgattgcatgcctcggtggaaggtggcgatccttatccccttccggaaccgccacgagcacctcccagtcctgttcagacacctgcttcccatgctccagcgccagcgcttgcagtttgcattttatgtggttgaacaagttggtacccaaccctttaatcgagccatgcttttcaacgttggctttcaagaggcaatgaaagacttggattgggactgtttgatttttcatgatgtagatcacataccggaaagtgatcgcaactattatggatgtggacagatgccgaggcattttgcaaccaaattggataagtatatgtatctgcttccttataccgagttctttggcggagtgagtggcttaacagtggaacaatttcggaaaatcaatggctttcctaatgctttctggggttggggtggagaagatgacgacctctggaacagagtacagaatgcaggctattctgtgagccggccagagggtgacacaggaaagtacaagtccattcctcatcaccatcgaggagaagtccagtttcttggaaggtatgctctgctgaggaagtcaaaagaacggcaagggctggatggcctcaacaacctgaactactttgcaaacatcacatacgacgccttgtataaaaacataactgtcaacctgacacccgagctggctcaggtgaacgagtactga

SEQ ID NO: 69 - DNA, 681 bp, Homo sapiens
atggagactgtggtgattgttgccataggtgtgctggccaccatctttctggcttcgtttgcagccttggtgctggtttgcaggcagcgctactgccggccgcgagacctgctgcagcgctatgattctaagcccattgtggacctcattggtgccatggagacccagtctgagccctctgagttagaactggacgatgtcgttatcaccaacccccacattgaggccattctggagaatgaagactggatcgaagatgcctcgggtctcatgtcccactgcattgccatcttgaagatttgtcacactctgacagagaagcttgttgccatgacaatgggctctggggccaagatgaagacttcagccagtgtcagcgacatcattgtggtggccaagcggatcagccccagggtggatgatgttgtgaagtcgatgtaccctccgttggaccccaaactcctggacgcacggacgactgccctgctcctgtctgtcagtcacctggtgctggtgacaaggaatgcctgccatctgacgggaggcctggactggattgaccagtctctgtcggctgctgaggagcatttggaagtccttcgagaagcagccctagcttctgagccagataaaggcctcccaggccctgaaggcttcctgcaggagcagtctgcaatttag

SEQ ID NO: 70 - DNA, 1926 bp, Homo sapiens
atgggtcctcctctgaagctcttcaaaaaccagaaataccaggaactgaagcaggaatgcatcaaagacagcagacttttctgtgatccaacatttctgcctgagaatgattctcttttctacaaccgactgcttcctggaaaggtggtgtggaaacgtccccaggacatctgtgatgacccccatctgattgtgggcaacattagcaaccaccagctgacccaagggagactggggcacaagccaatggtttctgcattttcctgtttggctgttcaggagtctcattggacaaagacaattcccaaccataaggaacaggaatgggaccctcaaaaaacagaaaaatacgctgggatatttcactttcgtttctggcattttggagaatggactgaagtggtgattgatgacttgttgcccaccattaacggagatctggtcttctctttctccacttccatgaatgagttttggaatgctctgctggaaaaagcttatgcaaagctgctaggctgttatgaggccctggatggtttgaccatcactgatattattgtggacttcacgggcacattggctgaaactgttgacatgcagaaaggaagatacactgagcttgttgaggagaagtacaagctattcggagaactgtacaaaacatttaccaaaggtggtctgatctgctgttccattgagtctcccaatcaggaggagcaagaagttgaaactgattggggtctgctgaagggccatacctataccatgactgatattcgcaaaattcgtcttggagagagacttgtggaagtcttcagtgctgagaaggtgtatatggttcgcctgagaaaccccttgggaagacaggaatggagtggcccctggagtgaaatttctgaagagtggcagcaactgactgcatcagatcgcaagaacctggggcttgttatgtctgatgatggagagttttggatgagcttggaggacttttgccgcaactttcacaaactgaatgtctgccgcaatgtgaacaaccctatttttggccgaaaggagctggaatcggtgttgggatgctggactgtggatgatgatcccctgatgaaccgctcaggaggctgctataacaaccgtgataccttcctgcagaatccccagtacatcttcactgtgcctgaggatgggcacaaggtcattatgtcactgcagcagaaggacctgcgcacttaccgccgaatgggaagacctgacaattacatcattggctttgagctcttcaaggtggagatgaaccgcaaattccgcctccaccacctctacatccaggagcgtgctgggacttccacctatattgacacccgcacagtgtttctgagcaagtacctgaagaagggcaactatgtgcttgtcccaaccatgttccagcatggtcgcaccagcgagtttctcctgagaatcttctctgaagtgcctgtccagctcagggaactgactctggacatgcccaaaatgtcctgctggaacctggctcgtggctacccgaaagtagttactcagatcactgttcacagtgctgaggacctggagaagaagtatgccaatgaaactgtaaacccatatttggtcatcaaatgtggaaaggaggaagtccgttctcctgtccagaagaatacagttcatgccatttttgacacccaggccattttctacagaaggaccactgacattcctattatagtacaggtctggaacagccgaaaattctgtgatcagttcttggggcaggttactctggatgctgaccccagcgactgccgtgatctgaagtctctgtacctgcgtaagaagggtggtccaactgccaaagtcaagcaaggccacatcagcttcaaggttatttccagcgatgatctcactgagctctaa

SEQ ID NO: 71 - protein, 689 aa, Homo sapiens
MAAATASPRSLLVLLQVVVLALAQIRGPPGERGPPGPPGPPGVPGSDGIDGDNGPPGKAGPPGPKGEPGKAGPDGPDGKPGIDGLTGAKGEPGPMGIPGVKGQPGLPGPPGLPGPGFAGPPGPPGPVGLPGEIGIRGPKGDPGPDGPSGPPGPPGKPGRPGTIQGLEGSADFLCPTNCPPGMKGPPGLQGVKGHAGKRGILGDPGHQGKPGPKGDVGASGEQGIPGPPGPQGIRGYPGMAGPKGETGPHGYKGMVGAIGATGPPGEEGPRGPPGRAGEKGDEGSPGIRGPQGITGPKGATGPPGINGKDGTPGTPGMKGSAGQAGQPGSPGHQGLAGVPGQPGTKGGPGDQGEPGPQGLPGFSGPPGKEGEPGPRGEIGPQGIMGQKGDQGERGPVGQPGPQGRQGPKGEQGPPGIPGPQGLPGVKGDKGSPGKTGPRGKVGDPGVAGLPGEKGEKGESGEPGPKGQQGVRGEPGYPGPSGDAGAPGVQGYPGPPGPRGLAGNRGVPGQPGRQGVEGRDATDQHIVDVALKMLQEQLAEVAVSAKREALGAVGMMGPPGPPGPPGYPGKQGPHGHPGPRGVPGIVGAVGQIGNTGPKGKRGEKGDPGEVGRGHPGMPGPPGIPGLPGRPGQAINGKDGDRGSPGAPGEAGRPGLPGPVGLPGFCEPAACLGASAYASARLTEPGSIKGP

SEQ ID NO: 72 - protein, 239 aa, Homo sapiens
MGLIWLLLLSLLEPGWPAAGPGARLRRDAGGRGGVYEHLGGAPRRRKLYCATKYHLQLHPSGRVNGSLENSAYSILEITAVEVGIVAIRGLFSGRYLAMNKRGRLYASEHYSAECEFVERIHELGYNTYASRLYRTVSSTPGARRQPSAERLWYVSVNGKGRPRRGFKTRRTQKSSLFLPRVLDHRDHEMVRQLQSGLPRPPGKGVQPRRRRQKQSPDNLEPSHVQASRLGSQLEASAH

SEQ ID NO: 73 - protein, 431 aa, Homo sapiens
MLALLAASVALAVAAGAQDSPAPGSRFVCTALPPEAVHAGCPLPAMPMQGGAQSPEEELRAAVLQLRETVVQQKETLGAQREAIRELTGKLARCEGLAGGKARGAGATGKDTMGDLPRDPGHVVEQLSRSLQTLKDRLESLEHQLRANVSNAGLPGDFREVLQQRLGELERQLLRKVAELEDEKSLLHNETSAHRQKTESTLNALLQRVTELERGNSAFKSPDAFKVSLPLRTNYLYGKIKKTLPELYAFTICLWLRSSASPGIGTPFSYAVPGQANEIVLIEWGNNPIELLINDKVAQLPLFVSDGKWHHICVTWTTRDGMWEAFQDGEKLGTGENLAPWHPIKPGGVLILGQEQDTVGGRFDATQAFVGELSQFNIWDRVLRAQEIVNIANCSTNMPGNIIPWVDNNVDVFGGASKWPVETCEERLLDL

SEQ ID NO: 74 - protein, 684 aa, Homo sapiens
MAGPRACAPLLLLLLLGELLAAAGAQRVGLPGPPGPPGPPGKPGQDGIDGEAGPPGLPGPPGPKGAPGKPGKPGEAGLPGLPGVDGLTGRDGPPGPKGAPGERGSLGPPGPPGLGGKGLPGPPGEAGVSGPPGGIGLRGPPGPSGLPGLPGPPGPPGPPGHPGVLPEGATDLQCPSICPPGPPGPPGMPGFKGPTGYKGEQGEVGKDGEKGDPGPPGPAGLPGSVGLQGPRGLRGLPGPLGPPGDRGPIGFRGPPGIPGAPGKAGDRGERGPEGFRGPKGDLGRPGPKGTPGVAGPSGEPGMPGKDGQNGVPGLDGQKGEAGRNGAPGEKGPNGLPGLPGRAGSKGEKGERGRAGELGEAGPSGEPGVPGDAGMPGERGEAGHRGSAGALGPQGPPGAPGVRGFQGQKGSMGDPGLPGPQGLRGDVGDRGPGGAAGPKGDQGIAGSDGLPGDKGELGPSGLVGPKGESGSRGELGPKGTQGPNGTSGVQGVPGPPGPLGLQGVPGVPGITGKPGVPGKEASEQRIRELCGGMISEQIAQLAAHLRKPLAPGSIGRPGPAGPPGPPGPPGSIGHPGARGPPGYRGPTGELGDPGPRGNQGDRGDKGAAGAGLDGPEGDQGPQGPQGVPGTSKDGQDGAPGEPGPPGDPGLPGAIGAQGTPGICDTSACQGAVLGGVGEKSGSRSS

SEQ ID NO: 75 - protein, 921 aa, Homo sapiens
MKTCWKIPVFFFVCSFLEPWASAAVKRRPRFPVNSNSNGGNELCPKIRIGQDDLPGFDLISQFQVDKAASRRAIQRVVGSATLQVAYKLGNNVDFRIPTRNLYPSGLPEEYSFLTTFRMTGSTLKKNWNIWQIQDSSGKEQVGIKINGQTQSVVFSYKGLDGSLQTAAFSNLSSLFDSQWHKIMIGVERSSATLFVDCNRIESLPIKPRGPIDIDGFAVLGKLADNPQVSVPFELQWMLIHCDPLRPRRETCHELPARITPSQTTDERGPPGEQGPPGPPGPPGVPGIDGIDGDRGPKGPPGPPGPAGEPGKPGAPGKPGTPGADGLTGPDGSPGSIGSKGQKGEPGVPGSRGFPGRGIPGPPGPPGTAGLPGELGRVGPVGDPGRRGPPGPPGPPGPRGTIGFHDGDPLCPNACPPGRSGYPGLPGMRGHKGAKGEIGEPGRQGHKGEEGDQGELGEVGAQGPPGAQGLRGITGIVGDKGEKGARGLDGEPGPQGLPGAPGDQGQRGPPGEAGPKGDRGAEGARGIPGLPGPKGDTGLPGVDGRDGIPGMPGTKGEPGKPGPPGDAGLQGLPGVPGIPGAKGVAGEKGSTGAPGKPGQMGNSGKPGQQGPPGEVGPRGPQGLPGSRGELGPVGSPGLPGKLGSLGSPGLPGLPGPPGLPGMKGDRGVVGEPGPKGEQGASGEEGEAGERGELGDIGLPGPKGSAGNPGEPGLRGPEGSRGLPGVEGPRGPPGPRGVQGEQGATGLPGVQGPPGRAPTDQHIKQVCMRVIQEHFAEMAASLKRPDSGATGLPGRPGPPGPPGPPGENGFPGQMGIRGLPGIKGPPGALGLRGPKGDLGEKGERGPPGRGPNGLPGAIGLPGDPGPASYGRNGRDGERGPPGVAGIPGVPGPPGPPGLPGFCEPASCTMQAGQRAFNKGPDP

SEQ ID NO: 76 - protein, 204 aa, Homo sapiens
MDPKDRKKIQFSVPAPPSQLDPRQVEMIRRRRPTPAMLFRLSEHSSPEEEASPHQRASGEGHHLKSKRPNPCAYTPPSLKAVQRIAESHLQSISNLNENQASEEEDELGELRELGYPREEDEEEEEDDEEEEEEEDSQAEVLKVIRQSAGQKTTCGQGLEGPWERPPPLDESERDGGSEDQVEDPALSEPGEEPQRPSPSEPGT

SEQ ID NO: 77 - protein, 450 aa, Homo sapiens
MGAPPGYRPSAWVHLLHQLPRADFQLRPVPSVFAPQEQEYQQALLLVAALAGLGLGLSLIFIAVYLIRFCCCRPPEPPGSKIPSPGGGCVTWSCIVALLAGCTGIGIGFYGNSETSDGVSQLSSALLHANHTLSTIDHLVLETVERLGEAVRTELTTLEEVLEPRTELVAAARGARRQAEAAAQQLQGLAFWQGVPLSPLQVAENVSFVEEYRWLAYVLLLLLELLVCLFTLLGLAKQSKWLVIVMTVMSLLVLVLSWGSMGLEAATAVGLSDFCSNPDPYVLNLTQEETGLSSDILSYYLLCNRAVSNPFQQRLTLSQRALANIHSQLLGLEREAVPQFPSAQKPLLSLEETLNVTEGNFHQLVALLHCRSLHKDYGAALRGLCEDALEGLLFLLLFSLLSAGALATALCSLPRAWALFPPSDDYDDTDDDDPFNPQESKRFVQWQSSI

SEQ ID NO: 78 - protein, 1025 aa, Homo sapiens
MAGTYSSTLKTLEDLTLDSGYGAGDSCRSLSLSSSKSNSQALNSSAQQHRGAAWWCYSGSMNSRHNSWDTVNTVLPEDPEVADLFSRCPRLPELEEFPWTEGDVARVLRKGAGGRRLPQFSAEAVRRLAGLLRRALIRVAREAQRLSVLHAKCTRFEVQSAVRLVHSWALAESCALAAVKALSLYSMSAGDGLRRGKSARCGLTFSVGRFFRWMVDTRISVRIHEYAAISLTACMENLVEEIRARVMASHSPDGGGAGGGEVSAEALEMVINNDAELWGVLQPYEHLICGKNANGVLSLPAYFSPYNGGSLGHDERADAYAQLELRTLEQSLLATCVGSISELSDLVSRAMHHMQGRHPLCPGASPARQARQPPQPITWSPDALHTLYYFLRCPQMESMENPNLDPPRMTLNNERPFMLLPPLMEWMRVAITYAEHRRSLTVDSGDIRQAARLLLPGLDCEPRQLKPEHCFSSFRRLDARAATEKFNQDLGFRMLNCGRTDLINQAIEALGPDGVNTMDDQGMTPLMYACAAGDEAMVQMLIDAGANLDIQVPSNSPRHPSIHPDSRHWTSLTFAVLHGHISVVQLLLDAGAHVEGSAVNGGEDSYAETPLQLASAAGNYELVSLLLSRGADPLLSMLEAHGMGSSLHEDMNCFSHSAAHGHRNVLRKLLTQPQQAKADVLSLEEILAEGVEESDASSQGSGSEGPVRLSRTRTKALQEAMYYSAEHGYVDITMELRALGVPWKLHIWIESLRTSFSQSRYSVVQSLLRDFSSIREEEYNEELVTEGLQLMFDILKTSKNDSVIQQLATIFTHCYGSSPIPSIPEIRKTLPARLDPHFLNNKEMSDVTFLVEGKLFYAHKVLLVTASNRFKTLMTNKSEQDGDSSKTIEISDMKYHIFQMMMQYLYYGGTESMEIPTTDILELLSAASLFQLDALQRHCEILCSQTLSMESAVNTYKYAKIHNAPELALFCEGFFLKHMKALLEQDAFRQLIYGRSSKVQGLDPLQDLQNTLAERVHSVYITSRV

SEQ ID NO: 79 - protein, 1199 aa, Homo sapiens
MASAGTQHYSIGLRQKNSFKQSGPSGTVPATPPEKPSEGRVWPQAHQQVKPIWKLEKKQVETLSAGLGPGLLGVPPQPAYFFCPSTLCSSGTTAVIAGHSSSCYLHSLPDLFNSTLLYRRSSYRQKPYQQLESFCLRSSPSEKSPFSLPQKSLPVSLTANKATSSMVFSMAQPMASSSTEPYLCLAAAGENPSGKSLASAISGKIPSPLSSSYKPMLNNNSFMWPNSTPVPLLQTTQGLKPVSPPKIQPVSWHHSGGTGDCAPQPVDHKVPKSIGTVPADASAHIALSTASSHDTSTTSVASSWYNRNNLAMRAEPLSCALDDSSDSQDPTKEIRFTEAVRKLTARGFEKMPRQGCQLEQSSFLNPSFQWNVLNRSRRWKPPAVNQQFPQEDAGSVRRVLPGASDTLGLDNTVFCTKRISIHLLASHASGLNHNPACESVIDSSAFGEGKAPGPPFPQTLGIANVATRLSSIQLGQSEKERPEEARELDSSDRDISSATDLQPDQAETEDTEEELVDGLEDCCSRDENEEEEGDSECSSLSAVSPSESVAMISRSCMEILTKPLSNHEKVVRPALIYSLFPNVPPTIYFGTRDERVEKLPWEQRKLLRWKMSTVTPNIVKQTIGRSHFKISKRNDDWLGCWGHHMKSPSFRSIREHQKLNHFPGSFQIGRKDRLWRNLSRMQSRFGKKEFSFFPQSFILPQDAKLLRKAWESSSRQKWIVKPPASARGIGIQVIHKWSQLPKRRPLLVQRYLHKPYLISGSKFDLRIYVYVTSYDPLRIYLFSDGLVRFASCKYSPSMKSLGNKFMHLTNYSVNKKNAEYQANADEMACQGHKWALKALWNYLSQKGVNSDAIWEKIKDVVVKTIISSEPYVTSLLKMYVRRPYSCHELFGFDIMLDENLKPWVLEVNISPSLHSSSPLDISIKGQMIRDLLNLAGFVLPNAEDIISSPSSCSSSTTSLPTSPGDKCRMAPEHVTAQKMKKAYYLTQKIPDQDFYASVLDVLTPDDVRILVEMEDEFSRRGQFERIFPSHISSRYLRFFEQPRYFNILTTQWEQKYHGNKLKGVDLLRSWCYKGFHMGVVSDSAPVWSLPTSLLTISKDDVILNAFSKSETSKLGKQSSCEVSLLLSEDGTTPKSKKTQAGLSPYPQKPSSSKDSEDTSKEPSLSTQTLPVIKCSGQTSRLSASSTFQSISDSLLAVSP

SEQ ID NO: 80 - protein, 565 aa, Homo sapiens
MNYEGARSERENHAADDSEGGALDMCCSERLPGLPQPIVMEALDEAEGLQDSQREMPPPPPPSPPSDPAQKPPPRGAGSHSLTVRSSLCLFAASQFLLACGVLWFSGYGHIWSQNATNLVSSLLTLLKQLEPTAWLDSGTWGVPSLLLVFLSVGLVLVTTLVWHLLRTPPEPPTPLPPEDRRQSVSRQPSFTYSEWMEEKIEDDFLDLDPVPETPVFDCVMDIKPEADPTSLTVKSMGLQERRGSNVSLTLDMCTPGCNEEGFGYLMSPREESAREYLLSASRVLQAEELHEKALDPFLLQAEFFEIPMNFVDPKEYDIPGLVRKNRYKTILPNPHSRVCLTSPDPDDPLSSYINANYIRGYGGEEKVYIATQGPIVSTVADFWRMVWQEHTPIIVMITNIEEMNEKCTEYWPEEQVAYDGVEITVQKVIHTEDYRLRLISLKSGTEERGLKHYWFTSWPDQKTPDRAPPLLHLVREVEEAAQQEGPHCAPIIVHCSAGIGRTGCFIATSICCQQLRQEGVVDILKTTCQLRQDRGGMIQTCEQYQFVHHVMSLYEKQLSHQSPE

SEQ ID NO: 81 - protein, 452 aa, Homo sapiens
MSETPAQCSIKQERISYTPPESPVPSYASSTPLHVPVPRALRMEEDSIRLPAHLRLQPIYWSRDDVAQWLKWAENEFSLRPIDSNTFEMNGKALLLLTKEDFRYRSPHSGDVLYELLQHILKQRKPRILFSPFFHPGNSIHTQPEVILHQNHEEDNCVQRTPRPSVDNVHHNPPTIELLHRSRSPITTNHRPSPDPEQRPLRSPLDNMIRRLSPAERAQGPRPHQENNHQESYPLSVSPMENNHCPASSESHPKPSSPRQESTRVIQLMPSPIMHPLILNPRHSVDFKQSRLSEDGLHREGKPINLSHREDLAYMNHIMVSVSPPEEHAMPIGRIADCRLLWDYVYQLLSDSRYENFIRWEDKESKIFRIVDPNGLARLWGNHKNRTNMTYEKMSRALRHYYKLNIIRKEPGQRLLFRFMKTPDEIMSGRTDRLEHLESQELDEQIYQEDEC

SEQ ID NO: 82 - protein, 739 aa, Homo sapiens
MAPWLQLCSVFFTVNACLNGSQLAVAAGGSGRARGADTCGWRGVGPASRNSGLYNITFKYDNCTTYLNPVGKHVIADAQNITISQYACHDQVAVTILWSPGALGIEFLKGFRVILEELKSEGRQCQQLILKDPKQLNSSFKRTGMESQPFLNMKFETDYFVKVVPFPSIKNESNYHPFFFRTRACDLLLQPDNLACKPFWKPRNLNISQHGSDMQVSFDHAPHNFGFRFFYLHYKLKHEGPFKRKTCKQEQTTETTSCLLQNVSPGDYIIELVDDTNTTRKVMHYALKPVHSPWAGPIRAVAITVPLVVISAFATLFTVMCRKKQQENIYSHLDEESSESSTYTAALPRERLRPRPKVFLCYSSKDGQNHMNVVQCFAYFLQDFCGCEVALDLWEDFSLCREGQREWVIQKIHESQFIIVVCSKGMKYFVDKKNYKHKGGGRGSGKGELFLVAVSAIAEKLRQAKQSSSAALSKFIAVYFDYSCEGDVPGILDLSTKYRLMDNLPQLCSHLHSRDHGLQEPGQHTRQGSRRNYFRSKSGRSLYVAICNMHQFIDEEPDWFEKQFVPFHPPPLRYREPVLEKFDSGLVLNDVMCKPGPESDFCLKVEAAVLGATGPADSQHESQHGGLDQDGEARPALDGSAALQPLLHTVKAGSPSDMPRDSGIYDSSVPSSELSLPLMEGLSTDQTETSSLTESVSSSSGLGEEEPPALPSKLLSSGSCKADLGCRSYTDELHAVAPL

SEQ ID NO: 83 - protein, 538 aa, Homo sapiens
MLQIGEDVDYLLIPREVRLAGGVWRVISKPATKEAEFRERLTQFLEEEGRTLEDVARIMEKSTPHPPQPPKKPKEPRVRRRVQQMVTPPPRLVVGTYDSSNASDSEFSDFETSRDKSRQGPRRGKKVRKMPVSYLGSKFLGSDLESEDDEELVEAFLRRQEKQPSAPPARRRVNLPVPMFEDNLGPQLSKADRWREYVSQVSWGKLKRRVKGWAPRAGPGVGEARLASTAVESAGVSSAPEGTSPGDRLGNAGDVCVPQASPRRWRPKINWASFRRRRKEQTAPTGQGADIEADQGGEAADSQREEAIADQREGAAGNQRAGAPADQGAEAADNQREEAADNQRAGAPAEEGAEAADNQREEAADNQRAEAPADQRSQGTDNHREEAADNQRAEAPADQGSEVTDNQREEAVHDQRERAPAVQGADNQRAQARAGQRAEAAHNQRAGAPGIQEAEVSAAQGTTGTAPGARARKQVKTVRFQTPGRFSWFCKRRRAFWHTPRLPTLPKRVPRAGEARNLRVLRAEARAEAEQGEQEDQL

SEQ ID NO: 84 - protein, 1613 aa, Homo sapiens
MGAVLRSLLACSFCVLLRAAPLLLYANRRDLRLVDATNGKENATIVVGGLEDAAAVDFVFSHGLIYWSDVSEEAIKRTEFNKTESVQNVVVSGLLSPDGLACDWLGEKLYWTDSETNRIEVSNLDGSLRKVLFWQELDQPRAIALDPSSGFMYWTDWGEVPKIERAGMDGSSRFIIINSEIYWPNGLTLDYEEQKLYWADAKLNFIHKSNLDGTNRQAVVKGSLPHPFALTLFEDILYWTDWSTHSILACNKYTGEGLREIHSDIFSPMDIHAFSQQRQPNATNPCGIDNGGCSHLCLMSPVKPFYQCACPTGVKLLENGKTCKDGATELLLLARRTDLRRISLDTPDFTDIVLQLEDIRHAIAIDYDPVEGYIYWTDDEVRAIRRSFIDGSGSQFVVTAQIAHPDGIAVDWVARNLYWTDTGTDRIEVTRLNGTMRKILISEDLEEPRAIVLDPMVGYMYWTDWGEIPKIERAALDGSDRVVLVNTSLGWPNGLALDYDEGKIYWGDAKTDKIEVMNTDGTGRRVLVEDKIPHIFGFTLLGDYVYWTDWQRRSIERVHKRSAEREVIIDQLPDLMGLKATNVHRVIGSNPCAEENGGCSHLCLYRPQGLRCACPIGFELISDMKTCIVPEAFLLFSRRADIRRISLETNNNNVAIPLTGVKEASALDFDVTDNRIYWTDISLKTISRAFMNGSALEHVVEFGLDYPEGMAVDWLGKNLYWADTGTNRIEVSKLDGQHRQVLVWKDLDSPRALALDPAEGFMYWTEWGGKPKIDRAAMDGSERTTLVPNVGRANGLTIDYAKRRLYWTDLDTNLIESSNMLGLNREVIADDLPHPFGLTQYQDYIYWTDWSRRSIERANKTSGQNRTIIQGHLDYVMDILVFHSSRQSGWNECASSNGHCSHLCLAVPVGGFVCGCPAHYSLNADNRTCSAPTTFLLFSQKSAINRMVIDEQQSPDIILPIHSLRNVRAIDYDPLDKQLYWIDSRQNMIRKAQEDGSQGFTVVVSSVPSQNLEIQPYDLSIDIYSRYIYWTCEATNVINVTRLDGRSVGVVLKGEQDRPRAVVVNPEKGYMYFTNLQERSPKIERAALDGTEREVLFFSGLSKPIALALDSRLGKLFWADSDLRRIESSDLSGANRIVLEDSNILQPVGLTVFENWLYWIDKQQQMIEKIDMTGREGRTKVQARIAQLSDIHAVKELNLQEYRQHPCAQDNGGCSHICLVKGDGTTRCSCPMHLVLLQDELSCGEPPTCSPQQFTCFTGEIDCIPVAWRCDGFTECEDHSDELNCPVCSESQFQCASGQCIDGALRCNGDANCQDKSDEKNCEVLCLIDQFRCANGQCIGKHKKCDHNVDCSDKSDELDCYPTEEPAPQATNTVGSVIGVIVTIFVSGTVYFICQRMLCPRMKGDGETMTNDYVVHGPASVPLGYVPHPSSLSGSLPGMSRGKSMISSLSIMGGSSGPPYDRAHVTGASSSSSSSTKGTYFPAILNPPPSPATERSHYTMEFGYSSNSPSTHRSYSYRPYSYRHFAPPTTPCSTDVCDSDYAPSRRMTSVATAKGYTSDLNYDSEPVPPPPTPRSQYLSAEENYESCPPSPYTERSYSHHLYPPPPSPCTDSS

SEQ ID NO: 85 - protein, 513 aa, Homo sapiens
MAMEIDSRPGGLPGSSCNLGAAREHMQAVTRNYITHPRVTYRTVCSVNGPLVVLDRVKFAQYAEIVHFTLPDGTQRSGQVLEVAGTKAIVQVFEGTSGIDARKTTCEFTGDILRTPVSEDMLGRVFNGSGKPIDKGPVVMAEDFLDINGQPINPHSRIYPEEMIQTGISPIDVMNSIARGQKIPIFSAAGLPHNEIAAQICRQAGLVKKSKAVLDYHDDNFAIVFAAMGVNMETARFFKSDFEQNGTMGNVCLFLNLANDPTIERIITPRLALTTAEFLAYQCEKHVLVILTDMSSYAEALREVSAAREEVPGRRGFPGYMYTDLATIYERAGRVEGRGGSITQIPILTMPNDDITHPIPDLTGFITEGQIYVDRQLHNRQIYPPINVLPSLSRLMKSAIGEGMTRKDHGDVSNQLYACYAIGKDVQAMKAVVGEEALTSEDLLYLEFLQKFEKNFINQGPYENRSVFESLDLGWKLLRIFPKEMLKRIPQAVIDEFYSREGALQDLAPDTAL

SEQ ID NO: 86 - protein, 691 aa, Homo sapiens
MKKDVRILLVGEPRVGKTSLIMSLVSEEFPEEVPPRAEEITIPADVTPERVPTHIVDYSEAEQSDEQLHQEISQANVICIVYAVNNKHSIDKVTSRWIPLINERTDKDSRLPLILVGNKSDLVEYSSMETILPIMNQYTEIETCVECSAKNLKNISELFYYAQKAVLHPTGPLYCPEEKEMKPACIKALTRIFKISDQDNDGTLNDAELNFFQRICFNTPLAPQALEDVKNVVRKHISDGVADSGLTLKGFLFLHTLFIQRGRHETTWTVLRRFGYDDDLDLTPEYLFPLLKIPPDCTTELNHHAYLFLQSTFDKHDLDRDCALSPDELKDLFKVFPYIPWGPDVNNTVCTNERGWITYQGFLSQWTLTTYLDVQRCLEYLGYLGYSILTEQESQASAVTVTRDKKIDLQKKQTQRNVFRCNVIGVKNCGKSGVLQALLGRNLMRQKKIREDHKSYYAINTVYVYGQEKYLLLHDISESEFLTEAEIICDVVCLVYDVSNPKSFEYCARIFKQHFMDSRIPCLIVAAKSDLHEVKQEYSISPTDFCRKHKMPPPQAFTCNTADAPSKDIFVKLTTMAMYPEDHYRDRLSRDMGHTDRIENLRKIWVFLKTAFHARLRCMCTCNRCTFCICQNFLNSDLLQSVKNKIFTAVLNRHVTQADLKSSTFWLRASFGATVFAVLGFAMYKALLKQR

SEQ ID NO: 87 - protein, 1315 aa, Homo sapiens
MEKYHVLEMIGEGSFGRVYKGRRKYSAQVVALKFIPKLGRSEKELRNLQREIEIMRGLRHPNIVHMLDSFETDKEVVVVTDYAEGELFQILEDDGKLPEDQVQAIAAQLVSALYYLHSHRILHRDMKPQNILLAKGGGIKLCDFGFARAMSTNTMVLTSIKGTPLYMSPELVEERPYDHTADLWSVGCILYELAVGTPPFYATSIFQLVSLILKDPVRWPSTISPCFKNFLQGLLTKDPRQRLSWPDLLYHPFIAGHVTIITEPAGPDLGTPFTSRLPPELQVLKDEQAHRLAPKGNQSRILTQAYKRMAEEAMQKKHQNTGPALEQEDKTSKVAPGTAPLPRLGATPQESSLLAGILASELKSSWAKSGTGEVPSAPRENRTTPDCERAFPEERPEVLGQRSTDVVDLENEEPDSDNEWQHLLETTEPVPIQLKAPLTLLCNPDFCQRIQSQLHEAGGQILKGILEGASHILPAFRVLSSLLSSCSDSVALYSFCREAGLPGLLLSLLRHSQESNSLQQQSWYGTFLQDLMAVIQAYFACTFNLERSQTSDSLQVFQEAANLFLDLLGKLLAQPDDSEQTLRRDSLMCFTVLCEAMDGNSRAISKAFYSSLLTTQQVVLDGLLHGLTVPQLPVHTPQGAPQVSQPLREQSEDIPGAISSALAAICTAPVGLPDCWDAKEQVCWHLANQLTEDSSQLRPSLISGLQHPILCLHLLKVLYSCCLVSEGLCRLLGQEPLALESLFMLIQGKVKVVDWEESTEVTLYFLSLLVFRLQNLPCGMEKLGSDVATLFTHSHVVSLVSAAACLLGQLGQQGVTFDLQPMEWMAAATHALSAPAEVRLTPPGSCGFYDGLLILLLQLLTEQGKASLIRDMSSSEMWTVLWHRFSMVLRLPEEASAQEGELSLSSPPSPEPDWTLISPQGMAALLSLAMATFTQEPQLCLSCLSQHGSILMSILKHLLCPSFLNQLRQAPHGSEFLPVVVLSVCQLLCFPFALDMDADLLIGVLADLRDSEVAAHLLQVCCYHLPLMQVELPISLLTRLALMDPTSLNQFVNTVSASPRTIVSFLSVALLSDQPLLTSDLLSLLAHTARVLSPSHLSFIQELLAGSDESYRPLRSLLGHPENSVRAHTYRLLGHLLQHSMALRGALQSQSGLLSLLLLGLGDKDPVVRCSASFAVGNAAYQAGPLGPALAAAVPSMTQLLGDPQAGIRRNVASALGNLGPEGLGEELLQCEVPQRLLEMACGDPQPNVKEAALIALRSLQQEPGIHQVLVSLGASEKLSLLSLGNQSLPHSSPRPASAKHCRKLIHLLRPAHSM

SEQ ID NO: 88 - protein, 125 aa, Homo sapiens
MAGPSLACCLLGLLALTSACYIQNCPLGGKRAAPDLDVRKCLPCGPGGKGRCFGPNICCAEELGCFVGTAEALRCQEENYLPSPCQSGQKACGSGGRCAVLGLCCSPDGCHADPACDAEATFSQR

SEQ ID NO: 89 - protein, 1541 aa, Homo sapiens
MSFLEEARAAGRAVVLALVLLLLPAVPVGASVPPRPLLPLQPGMPHVCAEQELTLVGRRQPCVQALSHTVPVWKAGCGWQAWCVGHERRTVYYMGYRQVYTTEARTVLRCCRGWMQQPDEEGCLSAECSASLCFHGGRCVPGSAQPCHCPPGFQGPRCQYDVDECRTHNGGCQHRCVNTPGSYLCECKPGFRLHTDSRTCLAINSCALGNGGCQHHCVQLTITRHRCQCRPGFQLQEDGRHCVRRSPCANRNGSCMHRCQVVRGLARCECHVGYQLAADGKACEDVDECAAGLAQCAHGCLNTQGSFKCVCHAGYELGADGRQCYRIEMEIVNSCEANNGGCSHGCSHTSAGPLCTCPRGYELDTDQRTCIDVDDCADSPCCQQVCTNNPGGYECGCYAGYRLSADGCGCEDVDECASSRGGCEHHCTNLAGSFQCSCEAGYRLHEDRRGCSPLEEPMVDLDGELPFVRPLPHIAVLQDELPQLFQDDDVGADEEEAELRGEHTLTEKFVCLDDSFGHDCSLTCDDCRNGGTCLLGLDGCDCPEGWTGLICNETCPPDTFGKNCSFSCSCQNGGTCDSVTGACRCPPGVSGTNCEDGCPKGYYGKHCRKKCNCANRGRCHRLYGACLCDPGLYGRFCHLTCPPWAFGPGCSEECQCVQPHTQSCDKRDGSCSCKAGFRGERCQAECELGYFGPGCWQACTCPVGVACDSVSGECGKRCPAGFQGEDCGQECPVGTFGVNCSSSCSCGGAPCHGVTGQCRCPPGRTGEDCEADCPEGRWGLGCQEICPACQHAARCDPETGACLCLPGFVGSRCQDVCPAGWYGPSCQTRCSCANDGHCHPATGHCSCAPGWTGFSCQRACDTGHWGPDCSHPCNCSAGHGSCDAISGLCLCEAGYVGPRCEQQCPQGHFGPGCEQRCQCQHGAACDHVSGACTCPAGWRGTFCEHACPAGFFGLDCRSACNCTAGAACDAVNGSCLCPAGRRGPRCAETCPAHTYGHNCSQACACFNGASCDPVHGQCHCAPGWMGPSCLQACPAGLYGDNCRHSCLCQNGGTCDPVSGHCACPEGWAGLACEKECLPRDVRAGCRHSGGCLNGGLCDPHTGRCLCPAGWTGDKCQSPCLRGWFGEACAQRCSCPPGAACHHVTGACRCPPGFTGSGCEQACPPGSFGEDCAQMCQCPGENPACHPATGTCSCAAGYHGPSCQQRCPPGRYGPGCEQLCGCLNGGSCDAATGACRCPTGFLGTDCNLTCPQGRFGPNCTHVCGCGQGAACDPVTGTCLCPPGRAGVRCERGCPQNRFGVGCEHTCSCRNGGLCHASNGSCSCGLGWTGRHCELACPPGRYGAACHLECSCHNNSTCEPATGTCRCGPGFYGQACEHPCPPGFHGAGCQGLCWCQHGAPCDPISGRCLCPAGFHGHFCERGCEPGSFGEGCHQRCDCDGGAPCDPVTGLCLCPPGRSGATCNLDCRRGQFGPSCTLHCDCGGGADCDPVSGQCHCVDGYMGPTCREGGPLRLPENPSLAQGSAGTLPASSRPTSRSGGPARH

SEQ ID NO: 90 - protein, 220 aa, Homo sapiens
MPLTGVGPGSCRRQIIRALCLLLLLLHAGSAKNIWKRALPARLAEKSRAEEAGAPGGPRQPRADRCPPPPRTLPPGACQAARCQADSECPRHRRCCYNGCAYACLEAVPPPPVLDWLVQPKPRWLGGNGWLLDGPEEVLQAEACSTTEDGAEPLLCPSGYECHILSPGDVAEGIPNRGQCVKQRRQADGRILRHKLYKEYPEGDSKNVAEPGRGQQKHFQ

SEQ ID NO: 91 - protein, 1030 aa, Homo sapiens
MRSEALLLYFTLLHFAGAGFPEDSEPISISHGNYTKQYPVFVGHKPGRNTTQRHRLDIQMIMIMNGTLYIAARDHIYTVDIDTSHTEEIYCSKKLTWKSRQADVDTCRMKGKHKDECHNFIKVLLKKNDDALFVCGTNAFNPSCRNYKMDTLEPFGDEFSGMARCPYDAKHANVALFADGKLYSATVTDFLAIDAVIYRSLGESPTLRTVKHDSKWLKEPYFVQAVDYGDYIYFFFREIAVEYNTMGKVVFPRVAQVCKNDMGGSQRVLEKQWTSFLKARLNCSVPGDSHFYFNILQAVTDVIRINGRDVVLATFSTPYNSIPGSAVCAYDMLDIASVFTGRFKEQKSPDSTWTPVPDERVPKPRPGCCAGSSSLERYATSNEFPDDTLNFIKTHPLMDEAVPSIFNRPWFLRTMVRYRLTKIAVDTAAGPYQNHTVVFLGSEKGIILKFLARIGNSGFLNDSLFLEEMSVYNSEKCSYDGVEDKRIMGMQLDRASSSLYVAFSTCVIKVPLGRCERHGKCKKTCIASRDPYCGWIKEGGACSHLSPNSRLTFEQDIERGNTDGLGDCHNSFVALNGHSSSLLPSTTTSDSTAQEGYESRGGMLDWKHLLDSPDSTDPLGAVSSHNHQDKKGVIRESYLKGHDQLVPVTLLAIAVILAFVMGAVFSGITVYCVCDHRRKDVAVVQRKEKELTHSRRGSMSSVTKLSGLFGDTQSKDPKPEAILTPLMHNGKLATPGNTAKMLIKADQHHLDLTALPTPESTPTLQQKRKPSRGSREWERNQNLINACTKDMPPMGSPVIPTDLPLRASPSHIPSVVVLPITQQGYQHEYVDQPKMSEVAQMALEDQAATLEYKTIKEHLSSKSPNHGVNLVENLDSLPPKVPQREASLGPPGASLSQTGLSKRLEMHHSSSYGVDYKRSYPTNSLTRSHQATTLKRNNTNSSNSSHLSRNQSFGRGDNPPPAPQRVDSIQVHSSQPSGQAVTVSRQPSLNAYNSLTRSGLKRTPSLKPDVPPKPSFAPLSTSMKPNDACT

SEQ ID NO: 92 - protein, 802 aa, Homo sapiens
MDCGPPATLQPHLTGPPGTAHHPVAVCQQESLSFAELPALKPPSPVCLDLFPVAPEELRAPGSRWSLGTPAPLQGLLWPLSPGGSDTEITSGGMRPSRAGSWPHCPGAQPPALEGPWSPRHTQPQRRASHGSEKKSAWRKMRVYQREEVPGCPEAHAVFLEPGQVVQEQALSTEEPRVELSGSTRVSLEGPERRRFSASELMTRLHSSLRLGRNSAARALISGSGTGAAREGKASGMEARSVEMSGDRVSRPAPGDSREGDWSEPRLDTQEEPPLGSRSTNERRQSRFLLNSVLYQEYSDVASARELRRQQREEEGPGDEAEGAEEGPGPPRANLSPSSSFRAQRSARGSTFSLWQDIPDVRGSGVLATLSLRDCKLQEAKFELITSEASYIHSLSVAVGHFLGSAELSECLGAQDKQWLFSKLPEVKSTSERFLQDLEQRLEADVLRFSVCDVVLDHCPAFRRVYLPYVTNQAYQERTYQRLLLENPRFPGILARLEESPVCQRLPLTSFLILPFQRITRLKMLVENILKRTAQGSEDEDMATKAFNALKELVQECNASVQSMKRTEELIHLSKKIHFEGKIFPLISQARWLVRHGELVELAPLPAAPPAKLKLSSKAVYLHLFNDCLLLSRRKELGKFAVFVHAKMAELQVRDLSLKLQGIPGHVFLLQLLHGQHMKHQFLLRARTESEKQRWISALCPSSPQEDKEVISEGEDCPQVQCVRTYKALHPDELTLEKTDILSVRTWTSDGWLEGVRLADGEKGWVPQAYVEEISSLSARLRNLRENKRVTSATSKLGEAPV

SEQ ID NO: 93 - protein, 467 aa, Homo sapiens [sequence omitted]

SEQ ID NO: 94 - protein, 1194 aa, Homo sapiens
MAKPYEFNWQKEVPSFLQEGAVFDRYEEESFVFEPNCLFKVDEFGFFLTWRSEGKEGQVLECSLINSIRSGAIPKDPKILAALEAVGKSENDLEGRIVCVCSGTDLVNISFTYMVAENPEVTKQWVEGLRSIIHNFRANNVSPMTCLKKHWMKLAFMTNTNGKIPVRSITRTFASGKTEKVIFQALKELGLPSGKNDEIEPTAFSYEKFYELTQKICPRTDIEDLFKKINGDKTDYLTVDQLVSFLNEHQRDPRLNEILFPFYDAKRAMQIIEMYEPDEDLKKKGLISSDGFCRYLMSDENAPVFLDRLELYQEMDHPLAHYFISSSHNTYLTGRQFGGKSSVEMYRQVLLAGCRCVELDCWDGKGEDQEPIITHGKAMCTDILFKDVIQAIKETAFVTSEYPVILSFENHCSKYQQYKMSKYCEDLFGDLLLKQALESHPLEPGRALPSPNDLKRKILIKNKRLKPEVEKKQLEALRSMMEAGESASPANILEDDNEEEIESADQEEEAHPEFKFGNELSADDLGHKEAVANSVKKGLVTVEDEQAWMASYKYVGATTNIHPYLSTMINYAQPVKFQGFHVAEERNIHYNMSSFNESVGLGYLKTHAIEFVNYNKRQMSRIYPKGGRVDSSNYMPQIFWNAGCQMVSLNYQTPDLAMQLNQGKFEYNGSCGYLLKPDFMRRPDRTFDPFSETPVDGVIAATCSVQVISGQFLSDKKIGTYVEVDMYGLPTDTIRKEFRTRMVMNNGLNPVYNEESFVFRKVILPDLAVLRIAVYDDNNKLIGQRILPLDGLQAGYRHISLRNEGNKPLSLPTIFCNIVLKTYVPDGFGDIVDALSDPKKFLSITEKRADQMRAMGIETSDIADVPSDTSKNDKKGKANTAKANVTPQSSSELRPTTTAALASGVEAKKGIELIPQVRIEDLKQMKAYLKHLKKQQKELNSLKKKHAKEHSTMQKLHCTQVDKIVAQYDKEKSTHEKILEKAMKKKGGSNCLEMKKETEIKIQTLTSDHKSKVKEIVAQHTKEWSEMINTHSAEEQEIRDLHLSQQCELLKKLLINAHEQQTQQLKLSHDRESKEMRAHQAKISMENSKAISQDKSIKNKAERERRVRELNSSNTKKFLEERKRLAMKQSKEMDQLKKVQLEHLEFLEKQNEQLLKSCHAVSQTQGEGDAADGEIGSRDGPQTSNSSMKLQNAN

SEQ ID NO: 95 - protein, 822 aa, Homo sapiens [sequence omitted]

SEQ ID NO: 96 - protein, 509 aa, Homo sapiens
MNLLDPFMKMTDEQEKGLSGAPSPTMSEDSAGSPCPSGSGSDTENTRPQENTFPKGEPDLKKESEEDKFPVCIREAVSQVLKGYDWTLVPMPVRVNGSSKNKPHVKRPMNAFMVWAQAARRKLADQYPHLHNAELSKTLGKLWRLLNESEKRPFVEEAERLRVQHKKDHPDYKYQPRRRKSVKNGQAEAEEATEQTHISPNAIFKALQADSPHSSSGMSEVHSPGEHSGQSQGPPTPPTTPKTDVQPGKADLKREGRPLPEGGRQPPIDFRDVDIGELSSDVISNIETFDVNEFDQYLPPNGHPGVPATHGQVTYTGSYGISSTAATPASAGHVWMSKQQAPPPPPQQPPQAPPAPQAPPQPQAAPPQQPAAPPQQPQAHTLTTLSSEPGQSQRTHIKTEQLSPSHYSEQQQHSPQQIAYSPFNLPHYSPSYPPITRSQYDYTDHQNSSSYYSHAAGQGTGLYSTFTYMNPAQRPMYTPIADTSGVPSIPQTHSPQHWEQPVYTQLTRP

SEQ ID NO: 97 - protein, 1382 aa, Homo sapiens
MDEEENHYVSQLREVYSSCDTTGTGFLDRQELTQLCLKLHLEQQLPVLLQTLLGNDHFARVNFEEFKEGFVAVLSSNAGVRPSDEDSSSLESAASSAIPPKYVNGSKWYGRRSRPELCDAATEARRVPEQQTQASLKSHLWRSASLESVESPKSDEEAESTKEAQNELFEAQGQLQTWDSEDFGSPQKSCSPSFDTPESQIRGVWEELGVGSSGHLSEQELAVVCQSVGLQGLEKEELEDLFNKLDQDGDGKVSLEEFQLGLFSHEPALLLESSTRVKPSKAWSHYQVPEESGCHTTTTSSLVSLCSSLRLFSSIDDGSGFAFPDQVLAMWTQEGIQNGREILQSLDFSVDEKVNLLELTWALDNELMTVDSAVQQAALACYHQELSYQQGQVEQLARERDKARQDLERAEKRNLEFVKEMDDCHSTLEQLTEKKIKHLEQGYRERLSLLRSEVEAERELFWEQAHRQRAALEWDVGRLQAEEAGLREKLTLALKENSRLQKEIVEVVEKLSDSERLALKLQKDLEFVLKDKLEPQSAELLAQEERFAAVLKEYELKCRDLQDRNDELQAELEGLWARLPKNRHSPSWSPDGRRRQLPGLGPAGISFLGNSAPVSIETELMMEQVKEHYQDLRTQLETKVNYYEREIAALKRNFEKERKDMEQARRREVSVLEGQKADLEELHEKSQEVIWGLQEQLQDTARGPEPEQMGLAPCCTQALCGLALRHHSHLQQIRREAEAELSGELSGLGALPARRDLTLELEEPPQGPLPRGSQRSEQLELERALKLQPCASEKRAQMCVSLALEEEELELARGKRVDGPSLEAEMQALPKDGLVAGSGQEGTRGLLPLRPGCGERPLAWLAPGDGRESEEAAGAGPRRRQAQDTEATQSPAPAPAPASHGPSERWSRMQPCGVDGDIVPKEPEPFGASAAGLEQPGARELPLLGTERDASQTQPRMWEPPLRPAASCRGQAERLQAIQEERARSWSRGTQEQASEQQARAEGALEPGCHKHSVEVARRGSLPSHLQLADPQGSWQEQLAAPEEGETKIALEREKDDMETKLLHLEDVVRALEKHVDLRENDRLEFHRLSEENTLLKNDLGRVRQELEAAESTHDAQRKEIEVLKKDKEKACSEMEVLNRQNQNYKDQLSQLNVRVLQLGQEASTHQAQNEEHRVTIQMLTQSLEEVVRSGQQQSDQIQKLRVELECLNQEHQSLQLPWSELTQTLEESQDQVQGAHLRLRQAQAQHLQEVRLVPQDRVAELHRLLSLQGEQARRRLDAQREEHEKQLKATEERVEEAEMILKNMEMLLQEKVDKLKEQFEKNTKSDLLLKELYVENAHLVRALQATEEKQRGAEKQSRLLEEKVRALNKLVSRIAPAALSV

SEQ ID NO: 98 - protein, 807 aa, Homo sapiens
MMDSPFLELWQSKAVSIREQLGLGDRPNDSYCYNSAKNSTVLQGVTFGGIPTVLLIDVSCFLFLILVFSIIRRRFWDYGRIALVSEADSESRFQRLSSTSSSGQQDFENELGCCPWLTAIFRLHDDQILEWCGEDAIHYLSFQRHIIFLLVVVSFLSLCVILPVNLSGDLLDKDPYSFGRTTIANLQTDNDLLWLHTIFAVIYLFLTVGFMRHHTQSIKYKEENLVRRTLFITGLPRDARKETVESHFRDAYPTCEVVDVQLCYNVAKLIYLCKEKKKTEKSLTYYTNLQVKTGQRTLINPKPCGQFCCCEVLGCEWEDAISYYTRMKDRLLERITEEERHVQDQPLGMAFVTFQEKSMATYILKDFNACKCQSLQCKGEPQPSSHSRELYTSKWTVTFAADPEDICWKNLSIQGLRWWLQWLGINFTLFLGLFFLTTPSIILSTMDKFNVTKPIHALNNPIISQFFPTLLLWSFSALLPSIVYYSTLLESHWTKSGENQIMMTKVYIFLIFMVLILPSLGLTSLDFFFRWLFDKTSSEASIRLECVFLPDQGAFFVNYVIASAFIGNGMELLRLPGLILYTFRMIMAKTAADRRNVKQNQAFQYEFGAMYAWMLCVFTVIVAYSITCPIIAPFGLIYILLKHMVDRHNLYFVYLPAKLEKGIHFAAVNQALAAPILCLFWLYFFSFLRLGMKAPATLFTFLVLLLTILVCLAHTCFGCFKHLSPLNYKTEEPASDKGSEAEAHMPPPFTPYVPRILNGLASERTALSPQQQQQQTYGAIHNISGTIPGQCLAQSATGSVAAAPQEA

SEQ ID NO: 99 - protein, 888 aa, Homo sapiens
MDESALLDLLECPVCLERLDASAKVLPCQHTFCKRCLLGIVGSRNELRCPECRTLVGSGVEELPSNILLVRLLDGIKQRPWKPGPGGGSGTNCTNALRSQSSTVANCSSKDLQSSQGGQQPRVQSWSPPVRGIPQLPCAKALYNYEGKEPGDLKFSKGDIIILRRQVDENWYHGEVNGIHGFFPTNFVQIIKPLPQPPPQCKALYDFEVKDKEADKDCLPFAKDDVLTVIRRVDENWAEGMLADKIGIFPISYVEFNSAAKQLIEWDKPPVPGVDAGECSSAAAQSSTAPKHSDTKKNTKKRHSFTSLTMANKSSQASQNRHSMEISPPVLISSSNPTAAARISELSGLSCSAPSQVHISTTGLIVTPPPSSPVTTGPSFTFPSDVPYQAALGTLNPPLPPPPLLAATVLASTPPGATAAAAAAGMGPRPMAGSTDQIAHLRPQTRPSVYVAIYPYTPRKEDELELRKGEMFLVFERCQDGWFKGTSMHTSKIGVFPGNYVAPVTRAVTNASQAKVPMSTAGQTSRGVTMVSPSTAGGPAQKLQGNGVAGSPSVVPAAVVSAAHIQTSPQAKVLLHMTGQMTVNQARNAVRTVAAHNQERPTAAVTPIQVQNAAGLSPASVGLSHHSLASPQPAPLMPGSATHTAAISISRASAPLACAAAAPLTSPSITSASLEAEPSGRIVTVLPGLPTSPDSASSACGNSSATKPDKDSKKEKKGLLKLLSGASTKRKPRVSPPASPTLEVELGSAELPLQGAVGPELPPGGGHGRAGSCPVDGDGPVTTAVAGAALAQDAFHRKASSLDSAVPIAPPPRQACSSLGPVLNESRPVVCERHRVVVSYPPQSEAELELKEGDIVFVHKKREDGWFKGTLQRNGKTGLFPGSFVENI

SEQ ID NO: 100 - protein, 598 aa, Homo sapiens
MDALPRSGLNLKEEPLLPAGLGSVRSWMQGAGILDASTAAQSGVGLARAHFEKQPPSNLRKSNFFHFVLAMYDRQGQPVEVERTAFIDFVEKDREPGAEKTNNGIHYRLRLVYNNGLRTEQDLYVRLIDSMSKQAIIYEGQDKNPEMCRVLLTHEIMCSRCCDRKSCGNRNETPSDPVIIDRFFLKFFLKCNQNCLKNAGNPRDMRRFQVVVSTTVSVDGHVLAVSDNMFVHNNSKHGRRARRLDPSEAATPCIKAISPGEGWTTGGATVIVIGDNFFDGLQVVFGNVLVWSELITPHAIRVQTPPRHIPGVVEVTLSYKSKQFCKGCPGRFVYTALNEPTIDYGFQRLQKVIPRHPGDPERLPKEVLLKRAADLAEALYGVPGSNQELLLKRAADVAEALYSTPRAPGPLAPLAPSHPHPAVVGINAFSSPLAIAVGDATPGPEPGYARSCSSASPRGFAPSPGSQQSGYGGGLGAGLGGYGAPGVAGLGVPGSPSFLNGSTATSPFAIMPSSPPLAAASSMSLPAAAPTTSVFSFSPVNMISAVKQRSAFAPVLRPPSSPPQACPRAHGEGLPDQSFEDSDKFHSPARGLQGLAYS

SEQ ID NO: 101 - protein, 216 aa, Homo sapiens
MRSGCVVVHVWILAGLWLAVAGRPLAFSDAGPHVHYGWGDPIRLRHLYTSGPHGLSSCFLRIRADGVVDCARGQSAHSLLEIKAVALRTVAIKGVHSVRYLCMGADGKMQGLLQYSEEDCAFEEEIRPDGYNVYRSEKHRLPVSLSSAKQRQLYKNRGFLPLSHFLPMLPMVPEEPEDLRGHLESDMFSSPLETDSMDPFGLVTGLEAVRSPSFEK

SEQ ID NO: 102 - protein, 1925 aa, Homo sapiens
MFTLTGCRLVEKTQKVENPSVSFASSFPLIPLLLRGKSVQKKQAESKSQIKLHTQSAPFGLCPKDMMLTQAPSSVVRSRNSRNHTVNSGGSCLSASTVAIPAINDSSAAMSACSTISAQPASSMDTQMHSPKKQERVNKRVIWGIEVAEELHWKGWELGKETTRNLVLKNRSLKLQKMKYRPPKTKFFFTVIPQPIFLSPGITLTLPIVFRPLEAKEYMDQLWFEKAEGMFCVGLRATLPCHRLICRPPSLQLPMCAVGDTTEAFFCLDNVGDLPTFFTWEFSSPFQMLPATGLLEPGQASQIKVTFQPLTAVIYEVQATCWYGAGSRQRSSIQLQAVAKCAQLLVSIKHKCPEDQDAEGFQKLLYFGSVAVGCTSERQIRLHNPSAVNAPFRIEISPDELAEDQAFSCPTAHGIVLPGEKKCVSVFFHPKTLDTRTVDYCSIMPSGCASKTLLKVVGFCRGPAVSLQHYCVNFSWVNLGERSEQPLWIENQSDCTAHFQFAIDCLESVFTIRPAFGTLVGKARMTLHCAFQPTHPIICFRRVACLIHHQDPLFLDLMGTCHSDSTKPAILKPQHLTWYRTHLARGLTLYPPDILDAMLKEKKLAQDQNGALMIPIQDLEDMPAPQYPYIPPMTEFFFDGTSDITIFPPPISVEPVEVDFGACPGPEAPNPVPLCLMNHTKGKIMVVWTRRSDCPFWVTPESCDVPPLKSMAMRLHFQPPHPNCLYTVELEAFAIYKVLQSYSNIEEDCTMCPSWCLTVRARGHSYFAGFEHHIPQYSLDVPKLFPAVSSGEPTYRSLLLVNKDCKLLTFSLAPQRGSDVILRPTSGLVAPGAHQIILICTYPEGSSWKQHTFYLQCNASPQYLKEVSMYSREEPLQLKLDTHKSLYFKPTWVGCSSTSPFTFRNPSRLPLQFEWRVSEQHRKLLAVQPSRGLIQPNERLTLTWTFSPLEETKYLFQVGMWVWEAGLSPNANPAATTHYMLRLVGVGLTSSLSAKEKELAFGNVLVNSKQSRFLVLLNDGNCTLYYRLYLEQGSPEAVDNHPLALQLDRTEGSMPPRSQDTICLTACPKQRSQYSWTITYSLLSHRDNKAGEKQELCCVSLVAVYPLLSILDVSSMGSAEGITRKHLWRLFSLDLLNSYLERDPTPCELTYKVPTRHSMSQIPPVLTPLRLDFNFGAAPFKAPPSVVFLALKNSGVVSLDWAFLLPSDQRIDVELWAEQAELNSTELHQMRVQDNCLFSISPKAGSLSPGQEQMVELKYSHLFIGTDHLPVLFKVSHGREILLNFIGVTVKPEQKYVHFTSTTHQFIPIPIGDTLPPRQIYELYNGGSVPVTYEVQTDVLSQVQEKNFDHPIFCCLNPKGEIQPGSTARVLWIFSPIEAKTYTVDVPIHILGWNSALIHFQGVGYNPHMMGDTAPFHNISSWDNSSIHSRLVVPGQNVFLSQSHISLGNIPVQSKCSRLLFLNNISKNEEIAFSWQPSPLDFGEVSVSPMIGVVAPEETVPFVVTLRASVHASFYSADLVCKLYSQQLMRQYHKELQEWKDEKVRQEVEFTITDMKVKKRTCCTACEPARKYKTLPPIKNQQSVSRPASWKLQTPKEEVSWPCPQPPSPGMLCLGLTARAHATDYFLANFFSEFPCHFLHRELPKRKAPREESETSEEKSPNKWGPVSKQKKQLLVDILTTIIRGLLEDKNFHEAVDQSLVEQVPYFRQFWNEQSTKFMDQKNSLYLMPILPVPSSSWEDGKGKQPKEDRPEHYPGLGKKEEGEEEKGEEEEEELEEEEEEEEETEEEELGKEEIEEKEEERDEKEEKVSWAGIGPTPQPESQESMQWQWQQQLNVMVKEEQEQDEKEAIRRLPAFANLQEALLENMIQNILVEASRGEVVLTSRPRVIALPPFCVPRSLTPDTLLPTQQAEVLHPVVPLPTDLP

SEQ ID NO: 103 - protein, 114 aa, Homo sapiens
MRLLILALLGICSLTAYIVEGVGSEVSDKRTCVSLTTQRLPVSRIKTYTITEGSLRAVIFITKRGLKVCADPQATWVRDVVRSMDRKSNTRNNMIQTKPTGTQQSTNTAVTLTG

SEQ ID NO: 104 - protein, 1190 aa, Homo sapiens
MKTRQNKDSMSMRSGRKKEAPGPREELRSRGRASPGGVSTSSSDGKAEKSRQTAKKARVEEASTPKVNKQGRSEEISESESEETNAPKKTKTEQELPRPQSPSDLDSLDGRSLNDDGSSDPRDIDQDNRSTSPSIYSPGSVENDSDSSSGLSQGPARPYHPPPLFPPSPQPPDSTPRQPEASFEPHPSVTPTGYHAPMEPPTSRMFQAPPGAPPPHPQLYPGGTGGVLSGPPMGPKGGGAASSVGGPNGGKQHPPPTTPISVSSSGASGAPPTKPPTTPVGGGNLPSAPPPANFPHVTPNLPPPPALRPLNNASASPPGLGAQPLPGHLPSPHAMGQGMGGLPPGPEKGPTLAPSPHSLPPASSSAPAPPMRFPYSSSSSSSAAASSSSSSSSSSASPFPASQALPSYPHSFPPPTSLSVSNQPPKYTQPSLPSQAVWSQGPPPPPPYGRLLANSNAHPGPFPPSTGAQSTAHPPVSTHHHHHQQQQQQQQQQQQQQQQQQQHHGNSGPPPPGAFPHPLEGGSSHHAHPYAMSPSLGSLRPYPPGPAHLPPPHSQVSYSQAGPNGPPVSSSSNSSSSTSQGSYPCSHPSPSQGPQGAPYPFPPVPTVTTSSATLSTVIATVASSPAGYKTASPPGPPPYGKRAPSPGAYKTATPPGYKPGSPPSFRTGTPPGYRGTSPPAGPGTFKPGSPTVGPGPLPPAGPSGLPSLPPPPAAPASGPPLSATQIKQEPAEEYETPESPVPPARSPSPPPKVVDVPSHASQSARFNKHLDRGFNSCARSDLYFVPLEGSKLAKKRADLVEKVRREAEQRAREEKEREREREREKEREREKERELERSVKLAQEGRAPVECPSLGPVPHRPPFEPGSAVATVPPYLGPDTPALRTLSEYARPHVMSPGNRNHPFYVPLGAVDPGLLGYNVPALYSSDPAAREREREARERDLRDRLKPGFEVKPSELEPLHGVPGPGLDPFPRHGGLALQPGPPGLHPFPFHPSLGPLERERLALAAGPALRPDMSYAERLAAERQHAERVAALGNDPLARLQMLNVTPHHHQHSHIHSHLHLHQQDAIHAASASVHPLIDPLASGSHLTRIPYPAGTLPNPLLPHPLHENEVLRHQLFAAPYRDLPASLSAPMSAAHQLQAMHAQSAELQRLALEQQQWLHAHHPLHSVPLPAQEDYYSHLKKESDKPL

SEQ ID NO: 105 - protein, 466 aa, Homo sapiens
MAEEQDLSEVELSPVGSEEPRCLSPGSAPSLGPDGGGGGSGLRASPGPGELGKVKKEQQDGEADDDKFPVCIREAVSQVLSGYDWTLVPMPVRVNGASKSKPHVKRPMNAFMVWAQAARRKLADQYPHLHNAELSKTLGKLWRLLNESDKRPFIEEAERLRMQHKKDHPDYKYQPRRRKNGKAAQGEAECPGGEAEQGGTAAIQAHYKSAHLDHRHPGEGSPMSDGNPEHPSGQSHGPPTPPTTPKTELQSGKADPKRDGRSMGEGGKPHIDFGNVDIGEISHEVMSNMETFDVAELDQYLPPNGHPGHVSSYSAAGYGLGSALAVASGHSAWISKPPGVALPTVSPPGVDAKAQVKTETAGPQGPPHYTDQPSTSQIAYTSLSLPHYGSAFPSISRPQFDYSDHQPSGPYYGHSGQASGLYSAFSYMGPSQRPLYTAISDPSPSGPQSHSPTHWEQPVYTTLSRP

SEQ ID NO: 106 - protein, 450 aa, Homo sapiens
MLWKITDNVKYEEDCEDRHDGSSNGNPRVPHLSSAGQHLYSPAPPLSHTGVAEYQPPPYFPPPYQQLAYSQSADPYSHLGEAYAAAINPLHQPAPTGSQQQAWPGRQSQEGAGLPSHHGRPAGLLPHLSGLEAGAVSARRDAYRRSDLLLPHAHALDAAGLAENLGLHDMPHQMDEVQNVDDQHLLLHDQTVIRKGPISMTKNPLNLPCQKELVGAVMNPTEVFCSVPGRLSLLSSTSKYKVTVAEVQRRLSPPECLNASLLGGVLRRAKSKNGGRSLREKLDKIGLNLPAGRRKAAHVTLLTSLVEGEAVHLARDFAYVCEAEFPSKPVAEYLTRPHLGGRNEMAARKNMLLAAQQLCKEFTELLSQDRTPHGTSRLAPVLETNIQNCLSHFSLITHGFGSQAICAAVSALQNYIKEALIVIDKSYMNPGDQSPADSNKTLEKMEKHRK

SEQ ID NO: 107 - protein, 197 aa, Homo sapiens
MCTGKCARCVGLSLITLCLVCIVANALLLVPNGETSWTNTNHLSLQVWLMGGFIGGGLMVLCPGIAAVRAGGKGCCGAGCCGNRCRMLRSVFSSAFGVLGAIYCLSVSGAGLRNGPRCLMNGEWGYHFEDTAGAYLLNRTLWDRCEAPPRVVPWNVTLFSLLVAASCLEIVLCGIQLVNATIGVFCGDCRKKQDTPH

SEQ ID NO: 108 - protein, 993 aa, Homo sapiens
MASAAVESFVTKQLDLLELERDAEVEERRSWQENISLKELQSRGVCLLKLQVSSQRTGLYGRLLVTFEPRRYGSAAALPSNSFTSGDIVGLYDAANEGSQLATGILTRVTQKSVTVAFDESHDFQLSLDRENSYRLLKLANDVTYRRLKKALIALKKYHSGPASSLIEVLFGRSAPSPASEIHPLTFFNTCLDTSQKEAVLFALSQKELAIIHGPPGTGKTTTVVEIILQAVKQGLKVLCCAPSNIAVDNLVERLALCKQRILRLGHPARLLESIQQHSLDAVLARSDSAQIVADIRKDIDQVFVKNKKTQDKREKSNFRNEIKLLRKELKEREEAAMLESLTSANVVLATNTGASADGPLKLLPESYFDVVVIDECAQALEASCWIPLLKARKCILAGDHKQLPPTTVSHKAALAGLSLSLMERLAEEYGARVVRTLTVQYRMHQAIMRWASDTMYLGQLTAHSSVARHLLRDLPGVAATEETGVPLLLVDTAGCGLFELEEEDEQSKGNPGEVRLVSLHIQALVDAGVPARDIAVVSPYNLQVDLLRQSLVHRHPELEIKSVDGFQGREKEAVILSFVRSNRKGEVGFLAEDRRINVAVTRARRHVAVICDSRTVNNHAFLKTLVEYFTQHGEVRTAFEYLDDIVPENYSHENSQGSSHAATKPQGPATSTRTGSQRQEGGQEAAAPARQGRKKPAGKSLASEAPSQPSLNGGSPEGVESQDGVDHFRAMIVEFMASKKMQLEFPPSLNSHDRLRVHQIAEEHGLRHDSSGEGKRRFITVSKRAPRPRAALGPPAGTGGPAPLQPVPPTPAQTEQPPREQRGPDQPDLRTLHLERLQRVRSAQGQPASKEQQASGQQKLPEKKKKKAKGHPATDLPTEEDFEALVSAAVKADNTCGFAKCTAGVTTLGQFCQLCSRRYCLSHHLPEIHGCGERARAHARQRISREGVLYAGSGTKNGSLDPAKRAQLQRRLDKKLSELSNQRTSRRKERGT

SEQ ID NO: 109 - protein, 187 aa, Homo sapiens
MVAATVAAAWLLLWAAACAQQEQDFYDFKAVNIRGKLVSLEKYRGSVSLVVNVASECGFTDQHYRALQQLQRDLGPHHFNVLAFPCNQFGQQEPDSNKEIESFARRTYSVSFPMFSKIAVTGTGAHPAFKYLAQTSGKEPTWNFWKYLVAPDGKVVGAWDPTVSVEEVRPQITALVRKLILLKREDL

SEQ ID NO: 110 - protein, 833 aa, Homo sapiens
MAPHWAVWLLAARLWGLGIGAEVWWNLVPRKTVSSGELATVVRRFSQTGIQDFLTLTLTEPTGLLYVGAREALFAFSMEALELQGAISWEAPVEKKTECIQKGKNNQTECFNFIRFLQPYNASHLYVCGTYAFQPKCTYVNMLTFTLEHGEFEDGKGKCPYDPAKGHAGLLVDGELYSATLNNFLGTEPIILRNMGPHHSMKTEYLAFWLNEPHFVGSAYVPESVGSFTGDDDKVYFFFRERAVESDCYAEQVVARVARVCKGDMGGARTLQRKWTTFLKARLACSAPNWQLYFNQLQAMHTLQDTSWHNTTFFGVFQAQWGDMYLSAICEYQLEEIQRVFEGPYKEYHEEAQKWDRYTDPVPSPRPGSCINNWHRRHGYTSSLELPDNILNFVKKHPLMEEQVGPRWSRPLLVKKGTNFTHLVADRVTGLDGATYTVLFIGTGDGWLLKAVSLGPWVHLIEELQLFDQEPMRSLVLSQSKKLLFAGSRSQLVQLPVADCMKYRSCADCVLARDPYCAWSVNTSRCVAVGGHSGSLLIQHVMTSDTSGICNLRGSKKVRPTPKNITVVAGTDLVLPCHLSSNLAHARWTFGGRDLPAEQPGSFLYDARLQALVVMAAQPRHAGAYHCFSEEQGARLAAEGYLVAVVAGPSVTLEARAPLENLGLVWLAVVALGAVCLVLLLLVLSLRRRLREELEKGAKATERTLVYPLELPKEPTSPPFRPCPEPDEKLWDPVGYYYSDGSLKIVPGHARCQPGGGPPSPPPGIPGQPLPSPTRLHLGGGRNSNANGYVRLQLGGEDRGGLGHPLPELADELRRKLQQRQPLPDSNPEESSV

SEQ ID NO: 111 - protein, 347 aa, Homo sapiens
MSFVLSRMAACGGTCKNKVTVSKPVWDFLSKETPARLARLREEHRVSILIDGETSDIYVLQLSPQGPPPAPPNGLYLARKALKGLLKEAEKELKKAQRQGELMGCLALGGGGEHPEMHRAGPPPLRAAPLLPPGARGLPPPPPPLPPPLPPRLREEAEEQESTCPICLGEIQNAKTLEKCRHSFCEGCITRALQVKKACPMCGRFYGQLVGNQPQNGRMLVSKDATLLLPSYEKYGTIVIQYVFPPGVQGAEHPNPGVRYPGTTRVAYLPDCPEGNKVLTLFRKAFDQRLTFTIGTSMTTGRPNVITWNDIHHKTSCTGGPQLFGYPDPTYLTRVQEELRAKGITDD

SEQ ID NO: 112 - protein, 1132 aa, Homo sapiens
MELFQAKDHYILQQGERALWCSRRDGGLQLRPATDLLLAWNPICLGLVEGVIGKIQLHSDLPWWLILIRQKALVGKLPGDHEVCKVTKIAVLSLSEMEPQDLELELCKKHHFGINKPEKIIPSPDDSKFLLKTFTHIKSNVSAPNKKKVKESKEKEKLERRLLEELLKMFMDSESFYYSLTYDLTNSVQRQSTGERDGRPLWQKVDDRFFWNKYMIQDLTEIGTPDVDFWIIPMIQGFVQIEELVVNYTESSDDEKSSPETPPQESTCVDDIHPRFLVALISRRSRHRAGMRYKRRGVDKNGNVANYVETEQLIHVHNHTLSFVQTRGSVPVFWSQVGYRYNPRPRLDRSEKETVAYFCAHFEEQLNIYKKQVIINLVDQAGREKIIGDAYLKQVLLFNNSHLTYVSFDFHEHCRGMKFENVQTLTDAIYDIILDMKWCWVDEAGVICKQEGIFRVNCMDCLDRTNVVQAAIARVVMEQQLKKLGVMPPEQPLPVKCNRIYQIMWANNGDSISRQYAGTAALKGDFTRTGERKLAGVMKDGVNSANRYYLNRFKDAYRQAVIDLMQGIPVTEDLYSIFTKEKEHEALHKENQRSHQELISQLLQSYMKLLLPDDEKFHGGWALIDCDPSLIDATHRDVDVLLLLSNSAYYVAYYDDEVDKVNQYQRLSLENLEKIEIGPEPTLFGKPKFSCMRLHYRYKEASGYFHTLRAVMRNPEEDGKDTLQCIAEMLQITKQAMGSDLPIIEKKLERKSSKPHEDIIGIRSQNQGSLAQGKNFLMSKFSSLNQKVKQTKSNVNIGNLRKLGNFTKPEMKVNFLKPNLKVNLWKSDSSLETMENTGVMDKVQAESDGDMSSDNDSYHSDEFLTNSKSDEDRQLANSLESVGPIDYVLPSCGIIASAPRLGSRSQSLSSTDSSVHAPSEITVAHGSGLGKGQESPLKKSPSAGDVHILTGFAKPMDIYCHRFVQDAQNKVTHLSETRSVSQQASQERNQMTNQVSNETQSESTEQTPSRPSQLDVSLSATGPQFLSVEPAHSVASQKTPTSASSMLELETGLHVTPSPSESSSSRAVSPFAKIRSSMVQVASITQAGLTHGINFAVSKVQKSPPEPEIINQVQQNELKKMFIQCQTRIIQI

SEQ ID NO: 113 - protein, 1865 aa, Homo sapiens
MTRWVPTKREEKYGVAFYNYDARGADELSLQIGDTVHILETYEGWYRGYTLRKKSKKGIFPASYIHLKEAIVEGKGQHETVIPGDLPLIQEVTTTLREWSTIWRQLYVQDNREMFRSVRHMIYDLIEWRSQILSGTLPQDELKELKKKVTAKIDYGNRILDLDLVVRDEDGNILDPELTSTISLFRAHEIASKQVEERLQEEKSQKQNIDINRQAKFAATPSLALFVNLKNVVCKIGEDAEVLMSLYDPVESKFISENYLVRWSSSGLPKDIDRLHNLRAVFTDLGSKDLKREKISFVCQIVRVGRMELRDNNTRKLTSGLRRPFGVAVMDVTDIINGKVDDEDKQHFIPFQPVAGENDFLQTVINKVIAAKEVNHKGQGLWVTLKLLPGDIHQIRKEFPHLVDRTTAVARKTGFPEIIMPGDVRNDIYVTLVQGDFDKGSKTTAKNVEVTVSVYDEDGKRLEHVIFPGAGDEAISEYKSVIYYQVKQPRWFETVKVAIPIEDVNRSHLRFTFRHRSSQDSKDKSEKIFALAFVKLMRYDGTTLRDGEHDLIVYKAEAKKLEDAATYLSLPSTKAELEEKGHSATGKSMQSLGSCTISKDSFQISTLVCSTKLTQNVDLLGLLKWRSNTSLLQQNLRQLMKVDGGEVVKFLQDTLDALFNIMMENSESETFDTLVFDALVFIIGLIADRKFQHFNPVLETYIKKHFSATLAYTKLTKVLKNYVDGAEKPGVNEQLYKAMKALESIFKFIVRSRILFNQLYENKGEADFVESLLQLFRSINDMMSSMSDQTVRVKGAALKYLPTIVNDVKLVFDPKELSKMFTEFILNVPMGLLTIQKLYCLIEIVHSDLFTQHDCREILLPMMTDQLKYHLERQEDLEACCQLLSHILEVLYRKDVGPTQRHVQIIMEKLLRTVNRTVISMGRDSELIGNFVACMTAILRQMEDYHYAHLIKTFGKMRTDVVDFLMETFIMFKNLIGKNVYPFDWVIMNMVQNKVFLRAINQYADMLNKKFLDQANFELQLWNNYFHLAVAFLTQESLQLENFSSAKRAKILNKYGDMRRQIGFEIRDMWYNLGQHKIKFIPEMVGPILEMTLIPETELRKATIPIFFDMMQCEFHSTRSFQMFENEIITKLDHEVEGGRGDEQYKVLFDKILLEHCRKHKYLAKTGETFVKLVVRLMERLLDYRTIMHDENKENRMSCTVNVLNFYKEIEREEMYIRYLYKLCDLHKECDNYTEAAYTLLLHAKLLKWSEDVCVAHLTQRDGYQATTQGQLKEQLYQEIIHYFDKGKMWEEAIALGKELAEQYENEMFDYEQLSELLKKQAQFYENIVKVIRPKPDYFAVGYYGQGFPTFLRGKVFIYRGKEYERREDFEARLLTQFPNAEKMKTTSPPGDDIKNSPGQYIQCFTVKPKLDLPPKFHRPVSEQIVSFYRVNEVQRFEYSRPIRKGEKNPDNEFANMWIERTIYTTAYKLPGILRWFEVKSVFMVEISPLENAIETMQLTNDKINSMVQQHLDDPSLPINPLSMLLNGIVDPAVMGGFANYEKAFFTDRYLQEHPEAHEKIEKLKDLIAWQIPFLAEGIRIHGDKVTEALRPFHERMEACFKQLKEKVEKEYGVRIMPSSLDDRRGSRPRSMVRSFTMPSSSRPLSVASVSSLSSDSTPSRPGSDGFALEPLLPKKMHSRSQDKLDKDDLEKEKKDKKKEKRNSKHQEIFEKEFKPTDISLQQSEAVILSETISPLRPQRPKSQVMNVIGSERRFSVSPSSPSSQQTPPPVTPRAKLSFSMQSSLELNGMTGADVADVPPPLPLKGSVADYGNLMENQDLLGSPTPPPPPPHQRHLPPPLPSKTPPPPPPKTTRKQTSVDSGIVQ

SEQ ID NO: 114 - protein, 228 aa, Homo sapiens
MAEDKTKPSELDQGKYDADDNVKIICLGDSAVGKSKLMERFLMDGFQPQQLSTYALTLYKHTATVDGRTILVDFWDTAGQERFQSMHASYYHKAHACIMVFDVQRKVTYRNLSTWYTELREFRPEIPCIVVANKIDDINVTQKSFNFAKKFSLPLYFVSAADGTNVVKLFNDAIRLAVSYKQNSQDFMDEIFQELENFSLEQEEEDVPDQEQSSSIETPSEEAASPHS

SEQ ID NO: 115 - protein, 2514 aa, Homo sapiens
MSGSTQPVAQTWRATEPRYPPHSLSYPVQIARTHTDVGLLEYQHHSRDYASHLSPGSIIQPQRRRPSLLSEFQPGNERSQELHLRPESHSYLPELGKSEMEFIESKRPRLELLPDPLLRPSPLLATGQPAGSEDLTKDRSLTGKLEPVSPPSPPHTDPELELVPPRLSKEELIQNMDRVDREITMVEQQISKLKKKQQQLEEEAAKPPEPEKPVSPPPIESKHRSLVQIIYDENRKKAEAAHRILEGLGPQVELPLYNQPSDTRQYHENIKINQAMRKKLILYFKRRNHARKQWEQKFCQRYDQLMEAWEKKVERIENNPRRRAKESKVREYYEKQFPEIRKQRELQERMQSRVGQRGSGLSMSAARSEHEVSEIIDGLSEQENLEKQMRQLAVIPPMLYDADQQRIKFINMNGLMADPMKVYKDRQVMNMWSEQEKETFREKFMQHPKNFGLIASFLERKTVAECVLYYYLTKKNENYKSLVRRSYRRRGKSQQQQQQQQQQQQQQQQQPMPRSSQEEKDEKEKEKEAEKEEEKPEVENDKEDLLKEKTDDTSGEDNDEKEAVASKGRKTANSQGRRKGRITRSMANEANSEEAITPQQSAELASMELNESSRWTEEEMETAKKGLLEHGRNWSAIARMVGSKTVSQCKNFYFNYKKRQNLDEILQQHKLKMEKERNARRKKKKAPAAASEEAAFPPVVEDEEMEASGVSGNEEEMVEEAEALHASGNEVPRGECSGPATVNNSSDTESIPSPHTEAAKDTGQNGPKPPATLGADGPPPGPPTPPPEDIPAPTEPTPASEATGAPTPPPAPPSPSAPPPVVPKEEKEEETAAAPPVEEGEEQKPPAAEELAVDTGKAEEPVKSECTEEAEEGPAKGKDAEAAEATAEGALKAEKKEGGSGRATTAKSSGAPQDSDSSATCSADEVDEAEGGDKNRLLSPRPSLLTPTGDPRANASPQKPLDLKQLKQRAAAIPPIQVTKVHEPPREDAAPTKPAPPAPPPPQNLQPESDAPQQPGSSPRGKSRSPAPPADKEAFAAEAQKLPGDPPCWTSGLPFPVPPREVIKASPHAPDPSAFSYAPPGHPLPLGLHDTARPVLPRPPTISNPPPLISSAKHPSVLERQIGAISQGMSVQLHVPYSEHAKAPVGPVTMGLPLPMDPKKLAPFSGVKQEQLSPRGQAGPPESLGVPTAQEASVLRGTALGSVPGGSITKGIPSTRVPSDSAITYRGSITHGTPADVLYKGTITRIIGEDSPSRLDRGREDSLPKGHVIYEGKKGHVLSYEGGMSVTQCSKEDGRSSSGPPHETAAPKRTYDMMEGRVGRAISSASIEGLMGRAIPPERHSPHHLKEQHHIRGSITQGIPRSYVEAQEDYLRREAKLLKREGTPPPPPPSRDLTEAYKTQALGPLKLKPAHEGLVATVKEAGRSIHEIPREELRHTPELPLAPRPLKEGSITQGTPLKYDTGASTTGSKKHDVRSLIGSPGRTFPPVHPLDVMADARALERACYEESLKSRPGTASSSGGSIARGAPVIVPELGKPRQSPLTYEDHGAPFAGHLPRGSPVTTREPTPRLQEGSLSSSKASQDRKLTSTPREIAKSPHSTVPEHHPHPISPYEHLLRGVSGVDLYRSHIPLAFDPTSIPRGIPLDAAAAYYLPRHLAPNPTYPHLYPPYLIRGYPDTAALENRQTIINDYITSQQMHHNAATAMAQRADMLRGLSPRESSLALNYAAGPRGIIDLSQVPHLPVLVPPTPGTPATAMDRLAYLPTAPQPFSSRHSSSPLSPGGPTHLTKPTTTSSSERERDRDRERDRDREREKSILTSTTTVEHAPIWRPGTEQSSGSSGGGGGSSSRPASHSHAHQHSPISPRTQDALQQRPSVLHNTGMKGIITAVEPSTPTVLRSTSTSSPVRPAATFPPATHCPLGGTLDGVYPTLMEPVLLPKEAPRVARPERPRADTGHAFLAKPPARSGLEPASSPSKGSEPRPLVPPVSGHATIARTPAKNLAPHHASPDPPAPPASASDPHREKTQSKPFSIQELELRSLGYHGSSYSPEGVEPVSPVSSPSLTHDKGLPKHLEELDKSHLEGELRPKQPGPVKLGGEAAHLPHLRPLPESQPSSSPLLQTAPGVKGHQRVVTLAQHISEVITQDYTRHHPQQLSAPLPAPLYSFPGASCPVLDLRRPPSDLYLPPPDHGAPARGSPHSEGGKRSPEPNKTSVLGGGEDGIEPVSPPEGMTEPGHSRSAVYPLLYRDGEQTEPSRMGSKSPGNTSQPPAFFSKLTESNSAMVKSKKQEINKKLNTHNRNEPEYNISQPGTEIFNMPAITGTGLMTYRSQAVQEHASTNMGLEAIIRKALMGKYDQWEESPPLSANAFNPLNASASLPAAMPITAADGRSDHTLTSPGGGGKAKVSGRPSSRKAKSPAPGLASGDRPPSVSSVHSEGDCNRRTPLTNRVWEDRPSSAGSTPFPYNPLIMRLQAGVMASPPPPGLPAGSGPLAGPHHAWDEEPKPLLCSQYETLSDSE

SEQ ID NO: 116 - protein, 570 aa, Homo sapiens
MAFRGWRPPPPPLLLLLLWVTGQAAPVAGLGSDAELQIERRFVPDECPRTVRSGDFVRYHYVGTFPDGQKFDSSYDRDSTFNVFVGKGQLITGMDQALVGMCVNERRFVKIPPKLAYGNEGVSGVIPPNSVLHFDVLLMDIWNSEDQVQIHTYFKPPSCPRTIQVSDFVRYHYNGTFLDGTLFDSSHNRMKTYDTYVGIGWLIPGMDKGLLGMCVGEKRIITIPPFLAYGEDGDGKDIPGQASLVFDVALLDLHNPKDSISIENKVVPENCERISQSGDFLRYHYNGTLLDGTLFDSSYSRNRTFDTYIGQGYVIPGMDEGLLGVCIGEKRRIVVPPHLGYGEEGRGNIPGSAVLVFDIHVIDFHNPSDSISITSHYKPPDCSVLSKKGDYLKYHYNASLLDGTLLDSTWNLGKTYNIVLGSGQVVLGMDMGLREMCVGEKRTVIIPPHLGYGEAGVDGEVPGSAVLVFDIELLELVAGLPEGYMFIWNGEVSPNLFEEIDKDGNGEVLLEEFSEYIHAQVASGKGKLAPGFDAELIVKNMFTNQDRNGDGKVTAEEFKLKDQEAKHDEL

SEQ ID NO: 117 - protein, 248 aa, Homo sapiens
MAAGMYLEHYLDSIENLPFELQRNFQLMRDLDQRTEDLKAEIDKLATEYMSSARSLSSEEKLALLKQIQEAYGKCKEFGDDKVQLAMQTYEMVDKHIRRLDTDLARFEADLKEKQIESSDYDSSSSKGKKSRTQKEKKAARARSKGKNSDEEAPKTAQKKLKLVRTSPEYGMPSVTFGSVHPSDVLDMPVDPNEPTYCLCHQVSYGEMIGCDNPDCSIEWFHFACVGLTTKPRGKWFCPRCSQERKKK

SEQ ID NO: 118 - protein, 1093 aa, Homo sapiens
MKEMVGGCCVCSDERGWAENPLVYCDGHACSVAVHQACYGIVQVPTGPWFCRKCESQERAARVRCELCPHKDGALKRTDNGGWAHVVCALYIPEVQFANVLTMEPIVLQYVPHDRFNKTCYICEEQGRESKAASGACMTCNRHGCRQAFHVTCAQMAGLLCEEEVLEVDNVKYCGYCKYHFSKMKTSRHSSGGGGGGAGGGGGSMGGGGSGFISGRRSRSASPSTQQEKHPTHHERGQKKSRKDKERLKQKHKKRPESPPSILTPPVVPTADKVSSSASSSSHHEASTQETSESSRESKGKKSSSHSLSHKGKKLSSGKGVSSFTSASSSSSSSSSSSGGPFQPAVSSLQSSPDFSAFPKLEQPEEDKYSKPTAPAPSAPPSPSAPEPPKADLFEQKVVFSGFGPIMRFSTTTSSSGRARAPSPGDYKSPHVTGSGASAGTHKRMPALSATPVPADETPETGLKEKKHKASKRSRHGPGRPKGSRNKEGTGGPAAPSLPSAQLAGFTATAASPFSGGSLVSSGLGGLSSRTFGPSGSLPSLSLESPLLGAGIYTSNKDPISHSGGMLRAVCSTPLSSSLLGPPGTSALPRLSRSPFTSTLPSSSASISTTQVFSLAGSTFSLPSTHIFGTPMGAVNPLLSQAESSHTEPDLEDCSFRCRGTSPQESLSSMSPISSLPALFDQTASAPCGGGQLDPAAPGTTNMEQLLEKQGDGEAGVNIVEMLKALHALQKENQRLQEQILSLTAKKERLQILNVQLSVPFPALPAALPAANGPVPGPYGLPPQAGSSDSLSTSKSPPGKSSLGLDNSLSTSSEDPHSGCPSRSSSSLSFHSTPPPLPLLQQSPATLPLALPGAPAPLPPQPQNGLGRAPGAAGLGAMPMAEGLLGGLAGSGGLPLNGLLGGLNGAAAPNPASLSQAGGAPTLQLPGCLNSLTEQQRHLLQQQEQQLQQLQQLLASPQLTPEHQTVVYQMIQQIQQKRELQRLQMAGGSQLPMASLLAGSSTPLLSAGTPGLLPTASAPPLLPAGALVAPSLGNNTSLMAAAAAAAAVAAAGGPPVLTAQTNPFLSLSGAEGSGGGPKGGTADKGASANQEKG

SEQ ID NO: 119 - protein, 1749 aa, Homo sapiens
MHLKHLRTLLSPQDGAAKVTCMAWSQNNAKFAVCTVDRVVLLYDEHGERRDKFSTKPADMKYGRKSYMVKGMAFSPDSTKIAIGQTDNIIYVYKIGEDWGDKKVICNKFIQTSAVTCLQWPAEYIIVFGLAEGKVRLANTKTNKSSTIYGTESYVVSLTTNCSGKGILSGHADGTIVRYFFDDEGSGESQGKLVNHPCPPYALAWATNSIVAAGCDRKIVAYGKEGHMLQTFDYSRDPQEREFTTAVSSPGGQSVVLGSYDRLRVFNWIPRRSIWEEAKPKEITNLYTITALAWKRDGSRLCVGTLCGGVEQFDCCLRRSIYKNKFELTYVGPSQVIVKNLSSGTRVVLKSHYGYEVEEVKILGKERYLVAHTSETLLLGDLNTNRLSEIAWQGSGGNEKYFFENENVCMIFNAGELTLVEYGNNDTLGSVRTEFMNPHLISVRINERCQRGTEDNKKLAYLIDIKTIAIVDLIGGYNIGTVSHESRVDWLELNETGHKLLFRDRKLRLHLYDIESCSKTMILNFCSYMQWVPGSDVLVAQNRNSLCVWYNIEAPERVTMFTIRGDVIGLERGGGKTEVMVMEGVTTVAYTLDEGLIEFGTAIDDGNYIRATAFLETLEMTPETEAMWKTLSKLALEARQLHIAERCFSALGQVAKARFLHETNEIADQVSREYGGEGTDFYQVRARLAMLEKNYKLAEMIFLEQNAVEEAMGMYQELHRWDECIAVAEAKGHPALEKLRRSYYQWLMDTQQEERAGELQESQGDGLAAISLYLKAGLPAKAARLVLTREELLANTELVEHITAALIKGELYERAGDLFEKIHNPQKALECYRKGNAFMKAVELARLAFPVEVVKLEEAWGDHLVQQKQLDAAINHYIEARCSIKAIEAALGARQWKKAIYILDLQDRNTASKYYPLVAQHYASLQEYEIAEELYTKGDRTKDAIDMYTQAGRWEQAHKLAMKCMRPEDVSVLYITQAQEMEKQGKYREAERLYVTVQEPDLAITMYKKHKLYDDMIRLVGKHHPDLLSDTHLHLGKELEAEGRLQEAEYHYLEAQEWKATVNMYRASGLWEEAYRVARTQGGANAHKHVAYLWAKSLGGEAAVRLLNKLGLLEAAVDHAADNCSFEFAFELSRLALKHKTPEVHLKYAMFLEDEGKFEEAEAEFIRAGKPKEAVLMFVHNQDWEAAQRVAEAHDPDSVAEVLVGQARGALEEKDFQKAEGLLLRAQRPGLALNYYKEAGLWSDALRICKDYVPSQLEALQEEYEREATKKGARGVEGFVEQARHWEQAGEYSRAVDCYLKVRDSGNSGLAEKCWMKAAELSIKFLPPQRNMEVVLAVGPQLIGIGKHSAAAELYLNLDLVKEAIDAFIEGEEWNKAKRVAKELDPRYEDYVDQHYKEFLKNQGKVDSLVGVDVIAALDLYVEQGQWDKCIETATKQNYKILHKYVALYATHLIREGSSAQALALYVQHGAPANPQNFNIYKRIFTDMVSSPGTNCAEAYHSWADLRDVLFNLCENLVKSSEANSPAHEEFKTMLLIAHYYATRSAAQSVKQLETVAARLSVSLLRHTQLLPVDKAFYEAGIAAKAVGWDNMAFIFLNRFLDLTDAIEEGTLDGLDHSDFQDTDIPFEVPLPAKQHVPEAEREEVRDWVLTVSMDQRLEQVLPRDERGAYEASLVAASTGVRALPCLITGYPILRNKIEFKRPGKAANKDNWNKFLMAIKTSHSPVCQDVLKFISQWCGGLPSTSFSFQ

SEQ ID NO: 120 - protein, 689 aa, Homo sapiens [sequence omitted]

SEQ ID NO: 121 - protein, 477 aa, Homo sapiens
MEAVELARKLQEEATCSICLDYFTDPVMTTCGHNFCRACIQLSWEKARGKKGRRKRKGSFPCPECREMSPQRNLLPNRLLTKVAEMAQQHPGLQKQDLCQEHHEPLKLFCQKDQSPICVVCRESREHRLHRVLPAEEAVQGYKLKLEEDMEYLREQITRTGNLQAREEQSLAEWQGKVKERRERIVLEFEKMNLYLVEEEQRLLQALETEEEETASRLRESVACLDRQGHSLELLLLQLEERSTQGPLQMLQDMKEPLSRKNNVSVQCPEVAPPTRPRTVCRVPGQIEVLRGFLEDVVPDATSAYPYLLLYESRQRRYLGSSPEGSGFCSKDRFVAYPCAVGQTAFSSGRHYWEVGMNITGDALWALGVCRDNVSRKDRVPKCPENGFWVVQLSKGTKYLSTFSALTPVMLMEPPSHMGIFLDFEAGEVSFYSVSDGSHLHTYSQATFPGPLQPFFCLGAPKSGQMVISTVTMWVKG

SEQ ID NO: 122 - protein, 993 aa, Homo sapiens
MGSGRVPGLCLLVLLVHARAAQYSKAAQDVDECVEGTDNCHIDAICQNTPRSYKCICKSGYTGDGKHCKDVDECEREDNAGCVHDCVNIPGNYRCTCYDGFHLAHDGHNCLDVDECAEGNGGCQQSCVNMMGSYECHCREGFFLSDNQHTCIQRPEEGMNCMNKNHGCAHICRETPKGGIACECRPGFELTKNQRDCKLTCNYGNGGCQHTCDDTEQGPRCGCHIKFVLHTDGKTCIETCAVNNGGCDSKCHDAATGVHCTCPVGFMLQPDRKTCKDIDECRLNNGGCDHICRNTVGSFECSCKKGYKLLINERNCQDIDECSFDRTCDHICVNTPGSFQCLCHRGYLLYGITHCGDVDECSINRGGCRFGCINTPGSYQCTCPAGQGRLHWNGKDCTEPLKCQGSPGASKAMLSCNRSGKKDTCALTCPSRARFLPESENGFTVSCGTPSPRAAPARAGHNGNSTNSNHCHEAAVLSIKQRASFKIKDAKCRLHLRNKGKTEEAGRITGPGGAPCSECQVTFIHLKCDSSRKGKGRRARTPPGKEVTRLTLELEAEVRAEETTASCGLPCLRQRMERRLKGSLKMLRKSINQDRFLLRLAGLDYELAHKPGLVAGERAEPMESCRPGQHRAGTKCVSCPQGTYYHGQTEQCVPCPAGTFQEREGQLSCDLCPGSDAHGPLGATNVTTCAGQCPPGQHSVDGFKPCQPCPRGTYQPEAGRTLCFPCGGGLTTKHEGAISFQDCDTKVQCSPGHYYNTSIHRCIRCAMGSYQPDFRQNFCSRCPGNTSTDFDGSTSVAQCKNRQCGGELGEFTGYIESPNYPGNYPAGVECIWNINPPPKRKILIVVPEIFLPSEDECGDVLVMRKNSSPSSITTYETCQTYERPIAFTARSRKLWINFKTSEANSARGFQIPYVTYDEDYEQLVEDIVRDGRLYASENHQEILKDKKLIKAFFEVLAHPQNYFKYTEKHKEMLPKSFIKLLRSKVSSFLRPYK

SEQ ID NO: 123 - protein, 443 aa, Homo sapiens
MGGPRAWALLCLGLLLPGGGAAWSIGAAPFSGRRNWCSYVVTRTISCHVQNGTYLQRVLQNCPWPMSCPGSSYRTVVRPTYKVMYKIVTAREWRCCPGHSGVSCEEVAASSASLEPMWSGSTMRRMALRPTAFSGCLNCSKVSELTERLKVLEAKMTMLTVIEQPVPPTPATPEDPAPLWGPPPAQGSPGDGGLQDQVGAWGLPGPTGPKGDAGSRGPMGMRGPPGPQGPPGSPGRAGAVGTPGERGPPGPPGPPGPPGPPAPVGPPHARISQHGDPLLSNTFTETNNHWPQGPTGPPGPPGPMGPPGPPGPTGVPGSPGHIGPPGPTGPKGISGHPGEKGERGLRGEPGPQGSAGQRGEPGPKGDPGEKSHWGEGLHQLREALKILAERVLILETMIGLYEPELGSGAGPAGTGTPSLLRGKRGGHATNYRIVAPRSRDERG

SEQ ID NO: 124 - protein, 716 aa, Homo sapiens
MERTAGKELALAPLQDWGEETEDGAVYSVSLRRQRSQRRSPAEGPGGSQAPSPIANTFLHYRTSKVRVLRAARLERLVGELVFGDREQDPSFMPAFLATYRTFVPTACLLGFLLPPMPPPPPPGVEIKKTAVQDLSFNKNLRAVVSVLGSWLQDHPQDFRDHPAHSDLGSVRTFLGWAAPGSAEAQKAEKLLEDFLEEAEREQEEEPPQVWTGPPRVAQTSDPDSSEACAEEEEGLMPQGPQLLDFSVDEVAEQLTLIDLELFSKVRLYECLGSVWSQRDRPGAAGASPTVRATVAQFNTVTGCVLGSVLGAPGLAAPQRAQRLEKWIRIAQRCRELRNFSSLRAILSALQSNPIYRLKRSWGAVSREPLSTFRKLSQIFSDENNHLSSREILFQEEATEGSQEEDNTPGSLPSKPPPGPVPYLGTFLTDLVMLDTALPDMLEGDLINFEKRRKEWEILARIQQLQRRCQSYTLSPHPPILAALHAQNQLTEEQSYRLSRVIEPPAASCPSSPRIRRRISLTKRLSAKLAREKSSSPSGSPGDPSSPTSSLCISPSVSPGSPPSSPRSRDAPAGSPPASPGPQGPSTKLPLSLDLPSPRPFALPLGSPRIPLPAQQSSEARVIRVSIDNDHGNLYRSILLTSQDKAPSVVRRALQKHNVPQPWACDYQLFQVLPGDRVLLIPDNANVFYAMSPVAPRDFMLRRKEGTRNTLSVSPS

SEQ ID NO: 125 - protein, 193 aa, Homo sapiens
MLEVHIPSVGPEAEGPRQSPEKSHMVFRVEVLCSGRRHTVPRRYSEFHALHKRIKKLYKVPDFPSKRLPNWRTRGLEQRRQGLEAYIQGILYLNQEVPKELLEFLRLRHFPTDPKASNWGTLREFLPGDSSSQQHQRPVLSFHVDPYVCNPSPESLPNVVVNGVLQGLYSFSISPDKAQPKAACHPAPLPPMP

SEQ ID NO: 126 - protein, 723 aa, Homo sapiens
MSLSMRDPVIPGTSMAYHPFLPHRAPDFAMSAVLGHQPPFFPALTLPPNGAAALSLPGALAKPIMDQLVGAAETGIPFSSLGPQAHLRPLKTMEPEEEVEDDPKVHLEAKELWDQFHKRGTEMVITKSGRRMFPPFKVRCSGLDKKAKYILLMDIIAADDCRYKFHNSRWMVAGKADPEMPKRMYIHPDSPATGEQWMSKVVTFHKLKLTNNISDKHGFTILNSMHKYQPRFHIVRANDILKLPYSTFRTYLFPETEFIAVTAYQNDKITQLKIDNNPFAKGFRDTGNGRREKRKQLTLQSMRVFDERHKKENGTSDESSSEQAAFNCFAQASSPAASTVGTSNLKDLCPSEGESDAEAESKEEHGPEACDAAKISTTTSEEPCRDKGSPAVKAHLFAAERPRDSGRLDKASPDSRHSPATISSSTRGLGAEERRSPVREGTAPAKVEEARALPGKEAFAPLTVQTDAAAAHLAQGPLPGLGFAPGLAGQQFFNGHPLFLHPSQFAMGGAFSSMAAAGMGPLLATVSGASTGVSGLDSTAMASAAAAQGLSGASAATLPFHLQQHVLASQGLAMSPFGSLFPYPYTYMAAAAAASSAAASSSVHRHPFLNLNTMRPRLRYSPYSIPVPVPDGSSLLTTALPSMAAAAGPLDGKVAALAASPASVAVDSGSELNSRSSTLSSSSMSLSPKLCAEKEAATSELQSIQRLVSGLEAKPDRSRSASP

SEQ ID NO: 127 - protein, 1367 aa, Homo sapiens
MKSGSGGGSPTSLWGLLFLSAALSLWPTSGEICGPGIDIRNDYQQLKRLENCTVIEGYLHILLISKAEDYRSYRFPKLTVITEYLLLFRVAGLESLGDLFPNLTVIRGWKLFYNYALVIFEMTNLKDIGLYNLRNITRGAIRIEKNADLCYLSTVDWSLILDAVSNNYIVGNKPPKECGDLCPGTMEEKPMCEKTTINNEYNYRCWTTNRCQKMCPSTCGKRACTENNECCHPECLGSCSAPDNDTACVACRHYYYAGVCVPACPPNTYRFEGWRCVDRDFCANILSAESSDSEGFVIHDGECMQECPSGFIRNGSQSMYCIPCEGPCPKVCEEEKKTKTIDSVTSAQMLQGCTIFKGNLLINIRRGNNIASELENFMGLIEVVTGYVKIRHSHALVSLSFLKNLRLILGEEQLEGNYSFYVLDNQNLQQLWDWDHRNLTIKAGKMYFAFNPKLCVSEIYRMEEVTGTKGRQSKGDINTRNNGERASCESDVLHFTSTTTSKNRIIITWHRYRPPDYRDLISFTVYYKEAPFKNVTEYDGQDACGSNSWNMVDVDLPPNKDVEPGILLHGLKPWTQYAVYVKAVTLTMVENDHIRGAKSEILYIRTNASVPSIPLDVLSASNSSSQLIVKWNPPSLPNGNLSYYIVRWQRQPQDGYLYRHNYCSKDKIPIRKYADGTIDIEEVTENPKTEVCGGEKGPCCACPKTEAEKQAEKEEAEYRKVFENFLHNSIFVPRPERKRRDVMQVANTTMSSRSRNTTAADTYNITDPEELETEYPFFESRVDNKERTVISNLRPFTLYRIDIHSCNHEAEKLGCSASNFVFARTMPAEGADDIPGPVTWEPRPENSIFLKWPEPENPNGLILMYEIKYGSQVEDQRECVSRQEYRKYGGAKLNRLNPGNYTARIQATSLSGNGSWTDPVFFYVQAKTGYENFIHLIIALPVAVLLIVGGLVIMLYVFHRKRNNSRLGNGVLYASVNPEYFSAADVYVPDEWEVAREKITMSRELGQGSFGMVYEGVAKGVVKDEPETRVAIKTVNEAASMRERIEFLNEASVMKEFNCHHVVRLLGVVSQGQPTLVIMELMTRGDLKSYLRSLRPEMENNPVLAPPSLSKMIQMAGEIADGMAYLNANKFVHRDLAARNCMVAEDFTVKIGDFGMTRDIYETDYYRKGGKGLLPVRWMSPESLKDGVFTTYSDVWSFGVVLWEIATLAEQPYQGLSNEQVLRFVMEGGLLDKPDNCPDMLFELMRMCWQYNPKMRPSFLEIISSIKEEMEPGFREVSFYYSEENKLPEPEELDLEPENMESVPLDPSASSSSLPLPDRHSGHKAENGPGPGVLVLRASFDERQPYAHMNGGRKNERALPLPQSSTC

SEQ ID NO: 128 - protein, 227 aa, Homo sapiens
MGRPLLLPLLLLLQPPAFLQPGGSTGSGPSYLYGVTQPKHLSASMGGSVEIPFSFYYPWELAIVPNVRISWRRGHFHGQSFYSTRPPSIHKDYVNRLFLNWTEGQESGFLRISNLRKEDQSVYFCRVELDTRRSGRQQLQSIKGTKLTITQAVTTTTTWRPSSTTTIAGLRVTESKGHSESWHLSLDTAIRVALAVAVLKTVILGLLCLLLLWWRRRKGSRAPSSDF

SEQ ID NO: 129 - protein, 862 aa, Homo sapiens
MHSSWIPRGNYIESNRDDCTVSLIYAVHLKKSGYVFFEYQYVDNNIFFEFFIQNDQCQEMDTTTDKWVKLTDNGEWGSHSVMLKSGTNILYWRTTGILMGSKAVKPVLVKNITIEGVAYTSECFPCKPGTFSNKPGSFNCQVCPRNTYSEKGAKECIRCKDDSQFSEEGSSECTERPPCTTKDYFQIHTPCDEEGKTQIMYKWIEPKICREDLTDAIRLPPSGEKKDCPPCNPGFYNNGSSSCHPCPPGTFSDGTKECRPCPAGTEPALGFEYKWWNVLPGNMKTSCFNVGNSKCDGMNGWEVAGDHIQSGAGGSDNDYLILNLHIPGFKPPTSMTGATGSELGRITFVFETLCSADCVLYFMVDINRKSTNVVESWGGTKEKQAYTHIIFKNATFTFTWAFQRTNQGQDNRRFINDMVKIYSITATNAVDGVASSCRACALGSEQSGSSCVPCPPGHYIEKETNQCKECPPDTYLSIHQVYGKEACIPCGPGSKNNQDHSVCYSDCFFYHEKENQSLHYDFSNLSSVGSLMNGPSFTSKGTKYFHFFNISLCGHEGKKMALCTNNITDFTVKEIVAGSDDYTNLVGAFVCQSTIIPSESKGFRAALSSQSIILADTFIGVTVETTLKNINIKEDMFPVPTSQIPDVHFFYKSSTATTSCINGRSTAVKMRCNPTKSGAGVISVPSKCPAGTCDGCTFYFLWESAEACPLCTEHDFHEIEGACKRGFQETLYVWNEPKWCIKGISLPEKKLATCETVDFWLKVGAGVGAFTAVLLVALTCYFWKKNQKLEYKYSKLVMTTNSKECELPAADSCAIMEGEDNEEEVVYSNKQSLLGKLKSLATKEKEDHFESVQLKTSRSPNI

SEQ ID NO: 130 - protein, 647 aa, Homo sapiens
MAEEEAPKKSRAAGGGASWELCAGALSARLAEEGSGDAGGRRRPPVDPRRLARQLLLLLWLLEAPLLLGVRAQAAGQGPGQGPGPGQQPPPPPQQQQSGQQYNGERGISVPDHGYCQPISIPLCTDIAYNQTIMPNLLGHTNQEDAGLEVHQFYPLVKVQCSAELKFFLCSMYAPVCTVLEQALPPCRSLCERARQGCEALMNKFGFQWPDTLKCEKFPVHGAGELCVGQNTSDKGTPTPSLLPEFWTSNPQHGGGGHRGGFPGGAGASERGKFSCPRALKVPSYLNYHFLGEKDCGAPCEPTKVYGLMYFGPEELRFSRTWIGIWSVLCCASTLFTVLTYLVDMRRFSYPERPIIFLSGCYTAVAVAYIAGFLLEDRVVCNDKFAEDGARTVAQGTKKEGCTILFMMLYFFSMASSIWWVILSLTWFLAAGMKWGHEAIEANSQYFHLAAWAVPAIKTITILALGQVDGDVLSGVCFVGLNNVDALRGFVLAPLFVYLFIGTSFLLAGFVSLFRIRTIMKHDGTKTEKLEKLMVRIGVFSVLYTVPATIVIACYFYEQAFRDQWERSWVAQSCKSYAIPCPHLQAGGGAPPHPPMSPDFTVFMIKYLMTLIVGITSGFWIWSGKTLNSWRKFYTRLTNSKQGETTV

SEQ ID NO: 131 - protein, 758 aa, Homo sapiens
MRKQGVSSKRLQSSGRSQSKGRRGASLAREPEVEEEMEKSALGGGKLPRGSWRSSPGRIQSLKERKGLELEVVAKTFLLGPFQFVRNSLAQLREKVQELQARRFSSRTTLGIAVFVAILHWLHLVTLFENDRHFSHLSSLEREMTFRTEMGLYYSYFKTIIEAPSFLEGLWMIMNDRLTEYPLIINAIKRFHLYPEVIIASWYCTFMGIMNLFGLETKTCWNVTRIEPLNEVQSCEGLGDPACFYVGVIFILNGLMMGLFFMYGAYLSGTQLGGLITVLCFFFNHGEATRVMWTPPLRESFSYPFLVLQMCILTLILRTSSNDRRPFIALCLSNVAFMLPWQFAQFILFTQIASLFPMYVVGYIEPSKFQKIIYMNMISVTLSFILMFGNSMYLSSYYSSSLLMTWAIILKRNEIQKLGVSKLNFWLIQGSAWWCGTIILKFLTSKILGVSDHIRLSDLIAARILRYTDFDTLIYTCAPEFDFMEKATPLRYTKTLLLPVVMVITCFIFKKTVRDISYVLATNIYLRKQLLEHSELAFHTLQLLVFTALAILIMRLKMFLTPHMCVMASLICSRQLFGWLFRRVRFEKVIFGILTVMSIQGYANLRNQWSIIGEFNNLPQEELLQWIKYSTTSDAVFAGAMPTMASIKLSTLHPIVNHPHYEDADLRARTKIVYSTYSRKSAKEVRDKLLELHVNYYVLEEAWCVVRTKPGCSMLEIWDVEDPSNAANPPLCSVLLEDARPYFTTVFQNSVYRVLKVN

SEQ ID NO: 132 - protein, 2809 aa, Homo sapiens
MTLEGLYLARGPLARLLLAWSALLCMAGGQGRWDGALEAAGPGRVRRRGSPGILQGPNVCGSRFHAYCCPGWRTFPGRSQCVVPICRRACGEGFCSQPNLCTCADGTLAPSCGVSRGSGCSVSCMNGGTCRGASCLCQKGYTGTVCGQPICDRGCHNGGRCIGPNRCACVYGFMGPQCERDYRTGPCFGQVGPEGCQHQLTGLVCTKALCCATVGRAWGLPCELCPAQPHPCRRGFIPNIHTGACQDVDECQAVPGLCQGGSCVNMVGSFHCRCPVGHRLSDSSAACEDYRAGACFSVLFGGRCAGDLAGHYTRRQCCCDRGRCWAAGPVPELCPPRGSNEFQQLCAQRLPLLPGHPGLFPGLLGFGSNGMGPPLGPARLNPHGSDARGIPSLGPGNSNIGTATLNQTIDICRHFTNLCLNGRCLPTPSSYRCECNVGYTQDVRGECIDVDECTSSPCHHGDCVNIPGTYHCRCYPGFQATPTRQACVDVDECIVSGGLCHLGRCVNTEGSFQCVCNAGFELSPDGKNCVDHNECATSTMCVNGVCLNEDGSFSCLCKPGFLLAPGGHYCMDIDECQTPGICVNGHCTNTEGSFRCQCLGGLAVGTDGRVCVDTHVRSTCYGAIEKGSCARPFPGTVTKSECCCANPDHGFGEPCQLCPAKDSAEFQALCSSGLGITTDGRDINECALDPEVCANGVCENLRGSYRCVCNLGYEAGASGKDCTDVDECALNSLLCDNGWCQNSPGSYSCSCPPGFHFWQDTEICKDVDECLSSPCVSGVCRNLAGSYTCKCGPGSRLDPSGTFCLDSTKGTCWLKIQESRCEVNLQGASLRSECCATLGAAWGSPCERCEIDPACARGFARMTGVTCDDVNECESFPGVCPNGRCVNTAGSFRCECPEGLMLDASGRLCVDVRLEPCFLRWDEDECGVTLPGKYRMDVCCCSIGAVWGVECEACPDPESLEFASLCPRGLGFASRDFLSGRPFYKDVNECKVFPGLCTHGTCRNTVGSFHCACAGGFALDAQERNCTDIDECRISPDLCGQGTCVNTPGSFECECFPGYESGFMLMKNCMDVDECARDPLLCRGGTCTNTDGSYKCQCPPGHELTAKGTACEDIDECSLSDGLCPHGQCVNVIGAFQCSCHAGFQSTPDRQGCVDINECRVQNGGCDVHCINTEGSYRCSCGQGYSLMPDGRACADVDECEENPRVCDQGHCTNMPGGHRCLCYDGFMATPDMRTCVDVDECDLNPHICLHGDCENTKGSFVCHCQLGYMVRKGATGCSDVDECEVGGHNCDSHASCLNIPGSFSCRCLPGWVGDGFECHDLDECVSQEHRCSPRGDCLNVPGSYRCTCRQGFAGDGFFCEDRDECAENVDLCDNGQCLNAPGGYRCECEMGFDPTEDHRACQDVDECAQGNLCAFGSCENLPGMFRCICNGGYELDRGGGNCTDINECADPVNCINGVCINTPGSYLCSCPQDFELNPSGVGCVDTRAGNCFLETHDRGDSGISCSAEIGVGVTRASCCCSLGRAWGNPCELCPMANTTEYRTLCPGGEGFQPNRITVILEDIDECQELPGLCQGGDCVNTFGSFQCECPPGYHLSEHTRICEDIDECSTHSGICGPGTCYNTLGNYTCVCPAEYLQVNGGNNCMDMRKSVCFRHYNGTCQNELAFNVTRKMCCCSYNIGQAWNRPCEACPTPISPDYQILCGNQAPGFLTDIHTGKPLDIDECGEIPAICANGICINQIGSFRCECPAGFNYNSILLACEDVDECGSRESPCQQNADCINIPGSYRCKCTRGYKLSPGGACVGRNECREIPNVCSHGDCMDTEGSYMCLCHRGFQASADQTLCMDIDECDRQPCGNGTCKNIIGSYNCLCFPGFVVTHNGDCVDFDECTTLVGQVCRFGHCLNTAGSFHCLCQDGFELTADGKNCVDTNECLSLAGTCLPGTCQNLEGSFRCICPPGFQVQSDHCIDIDECSEEPNLCLFGTCTNSPGSFQCLCPPGFVLSDNGHRCFDTRQSFCFTRFEAGKCSVPKAFNTTKTRCCCSKRPGEGWGDPCELCPQEGSAAFQELCPFGHGAVPGPDDSREDVNECAENPGVCTNGVCVNTDGSFRCECPFGYSLDFTGINCVDTDECSVGHPCGQGTCTNVIGGFECACADGFEPGLMMTCEDIDECSLNPLLCAFRCHNTEGSYLCTCPAGYTLREDGAMCRDVDECADGQQDCHARGMECKNLIGTFACVCPPGMRPLPGSGEGCTDDNECHAQPDLCVNGRCVNTAGSFRCDCDEGFQPSPTLTECHDIRQGPCFAEVLQTMCRSLSSSSEAVTRAECCCGGGRGWGPRCELCPLPGTSAYRKLCPHGSGYTAEGRDVDECRMLAHLCAHGECINSLGSFRCHCQAGYTPDATATTCLDMDECSQVPKPCTFLCKNTKGSFLCSCPRGYLLEEDGRTCKDLDECTSRQHNCQFLCVNTVGAFTCRCPPGFTQHHQACFDNDECSAQPGPCGAHGHCHNTPGSFRCECHQGFTLVSSGHGCEDVNECDGPHRCQHGCQNQLGGYRCSCPQGFTQHSQWAQCVDENECALSPPTCGSASCRNTLGGFRCVCPSGFDFDQALGGCQEVDECAGRRGPCSYSCANTPGGFLCGCPQGYFRAGQGHCVSGLGFSPGPQDTPDKEELLSSEACYECKINGLSPRDRPRRSAHRDHQVNLATLDSEALLTLGLNLSHLGRAERILELRPALEGLEGRIRYVIVRGNEQGFFRMHHLRGVSSLQLGRRRPGPGTYRLEVVSHMAGPWGVQPEGQPGPWGQALRLKVQLQLL

SEQ ID NO: 133 - protein, 361 aa, Homo sapiens
MGGAVSAGEDNDELIDNLKEAQYIRTELVEQAFRAIDRADYYLEEFKENAYKDLAWKHGNIHLSAPCIYSEVMEALDLQPGLSFLNLGSGTGYLSSMVGLILGPFGVNHGVELHSDVIEYAKQKLDFFIRTSDSFDKFDFCEPSFVTGNCLEISPDCSQYDRVYCGAGVQKEHEEYMKNLLKVGGILVMPLEEKLTKITRTGPSAWETKKILAVSFAPLIQPCHSESGKSRLVQLPPVAVRSLQDLARIAIRGTIKKIIHQETVSKNGNGLKNTPRFKRRRVRRRRMETIVFLDKEVFASRISNPSDDNSCEDLEEERREEEEKTPPETKPDPPVNFLRQKVLSLPLPDPLKYYLLYYREK

SEQ ID NO: 134 - protein, 1257 aa, Homo sapiens
MAHFSSEDQAMLQAMLRRLFQSVKEKITGAPSLECAEEILLHLEETDENFHNYEFVKYLRQHIGNTLGSMIEEEMEKCTSDRNQGEECGYDTVVQQVTKRTQESKEYKEMMHYLKNIMIAVVESMINKFEEDETRNQERQKKIQKEKSHSYRTDNCSDSDSSLNQSYKFCQGKLQLILDQLDPGQPKEVRYEALQTLCSAPPSDVLNCENWTTLCEKLTVSLSDPDPVFSDRILKFCAQTFLLSPLHMTKEIYTSLAKYLESYFLSRENHIPTLSAGVDITNPNMTRLLKKVRLLNEYQKEAPSFWIRHPEKYMEEIVESTLSLLTVKHNQSHVVSQKILDPIYFFALVDTKAVWFKKWMHAHYSRTTVLRLLETKYKSLVTTAIQQCVQYFEMCKTRKADETLGHSKHCRNKQKTFYYLGQELQYIYFIHSLCLLGRLLIYKQGRKLFPIKLKNKKGLVSLIDLLVLFTQLIYYSPSCPKMTSAAHSENYSPASMVTEVLWILSDQKECAVECLYNNIVIETLLQPIHNLMKGNEASPNCSETALIHIAGILARIASVEEGLILLLYGANMNSSEESPTGAHIIAQFSKKLLDEDISIFSGSEMLPVVKGAFISVCRHIYSTCEGLQVLITYNLHESIAKAWKKTSLLSERIPTPVEGSDSVSSVSQESQNIMAWEDNLLDDLLHFAATPKGLLLLQRTGAINECVTFIFNRYAKKLQVSRHKKFGYGVLVTRVASTAAGGIALKKSGFINELITELWSNLEYGRDDVRVTHPRTTPVDPIDRSCQKSFLALVNLLSYPAIYELVRNQDLPNKTEYSLREVPTCVIDIIDRLIILNSEAKIRSLFNYEQSHIFGLRDFIIDGLSVERNHVLVRINLVGGPLERILPPRLLEKSDNPYPWPMFSSYPLPNCYLSDITRNAGIKQDNDLDKLLLCLKISDKQTEWIENCQRQFCKMMKAKPDIISGEALIELLEKFVLHLTESPSECYFPSVEYTATDANVKNESLSSVQQLGIKMTVRYGKFLSLLKDGAENDLTWVLKHCERFLKQQQTSIKSSLLCLQGNYAGHDWFVSSLFMIMLGDKEKTFQFLHQFSRLLTSAFLWLPRLHISSYLPNDTVESGIHPVYFCSTHYIEMLLKAELPLVFSAFHMSGFAPSQICLQWITQCFWNYLDWIEICHYIATCVFLGPDYQVYICIAVFKHLQQDILQHTQTQDLQVFLKEEALHGFRVSDYFEYMEILEQNYRTVLLRDMRNIRLQST

SEQ ID NO: 135 - protein, 272 aa, Homo sapiens
MATTGALGNYYVDSFLLGADAADELSVGRYAPGTLGQPPRQAATLAEHPDFSPCSFQSKATVFGASWNPVHAAGANAVPAAVYHHHHHHPYVHPQAPVAAAAPDGRYMRSWLEPTPGALSFAGLPSSRPYGIKPEPLSARRGDCPTLDTHTLSLTDYACGSPPVDREKQPSEGAFSENNAENESGGDKPPIDPNNPAANWLHARSTRKKRCPYTKHQTLELEKEFLFNMYLTRDRRYEVARLLNLTERQVKIWFQNRRMKMKKINKDRAKDE

SEQ ID NO: 136 - protein, 349 aa, Homo sapiens
MAGGRCGPQLTALLAAWIAAVAATAGPEEAALPPEQSRVQPMTASNWTLVMEGEWMLKFYAPWCPSCQQTDSEWEAFAKNGEILQISVGKVDVIQEPGLSGRFFVTTLPAFFHAKDGIFRRYRGPGIFEDLQNYILEKKWQSVEPLTGWKSPASLTMSGMAGLFSISGKIWHLHNYFTVTLGIPAWCSYVFFVIATLVFGLFMGLVLVVISECFYVPLPRHLSERSEQNRRSEEAHRAEQLQDAEEEKDDSNEEENKDSLVDDEEEKEDLGDEDEAEEEEEEDNLAAGVDEERSEANDQGPPGEDGVTREEVEPEEAEEGISEQPCPADTEVVEDSLRQRKSQHADKGL

SEQ ID NO: 137 - protein, 427 aa, Homo sapiens
MGAGATGRAMDGPRLLLLLLLGVSLGGAKEACPTGLYTHSGECCKACNLGEGVAQPCGANQTVCEPCLDSVTFSDVVSATEPCKPCTECVGLQSMSAPCVEADDAVCRCAYGYYQDETTGRCEACRVCEAGSGLVFSCQDKQNTVCEECPDGTYSDEANHVDPCLPCTVCEDTERQLRECTRWADAECEEIPGRWITRSTPPEGSDSTAPSTQEPEAPPEQDLIASTVAGVVTTVMGSSQPVVTRGTTDNLIPVYCSILAAVVVGLVAYIAFKRWNSCKQNKQGANSRPVNQTPPPEGEKLHSDSGISVDSQSLHDQQPHTQTASGQALKGDGGLYSSLPPAKREEVEKLLNGSAGDTWRHLAGELGYQPEHIDSFTHEACPVRALLASWATQDSATLDALLAALRRIQRADLVESLCSESTATSPV

SEQ ID NO: 138 - protein, 388 aa, Homo sapiens
MRARRGLLRLPRRSLLAALFFFSLSSSLLYFVYVAPGIVNTYLFMMQAQGILIRDNVRTIGAQVYEQVLRSAYAKRNSSVNDSDYPLDLNHSETFLQTTTFLPEDFTYFANHTCPERLPSMKGPIDINMSEIGMDYIHELFSKDPTIKLGGHWKPSDCMPRWKVAILIPFRNRHEHLPVLFRHLLPMLQRQRLQFAFYVVEQVGTQPFNRAMLFNVGFQEAMKDLDWDCLIFHDVDHIPESDRNYYGCGQMPRHFATKLDKYMYLLPYTEFFGGVSGLTVEQFRKINGFPNAFWGWGGEDDDLWNRVQNAGYSVSRPEGDTGKYKSIPHHHRGEVQFLGRYALLRKSKERQGLDGLNNLNYFANITYDALYKNITVNLTPELAQVNEY

SEQ ID NO: 139 - protein, 226 aa, Homo sapiens
METVVIVAIGVLATIFLASFAALVLVCRQRYCRPRDLLQRYDSKPIVDLIGAMETQSEPSELELDDVVITNPHIEAILENEDWIEDASGLMSHCIAILKICHTLTEKLVAMTMGSGAKMKTSASVSDIIVVAKRISPRVDDVVKSMYPPLDPKLLDARTTALLLSVSHLVLVTRNACHLTGGLDWIDQSLSAAEEHLEVLREAALASEPDKGLPGPEGFLQEQSAI

SEQ ID NO: 140 - protein, 641 aa, Homo sapiens
MGPPLKLFKNQKYQELKQECIKDSRLFCDPTFLPENDSLFYNRLLPGKVVWKRPQDICDDPHLIVGNISNHQLTQGRLGHKPMVSAFSCLAVQESHWTKTIPNHKEQEWDPQKTEKYAGIFHFRFWHFGEWTEVVIDDLLPTINGDLVFSFSTSMNEFWNALLEKAYAKLLGCYEALDGLTITDIIVDFTGTLAETVDMQKGRYTELVEEKYKLFGELYKTFTKGGLICCSIESPNQEEQEVETDWGLLKGHTYTMTDIRKIRLGERLVEVFSAEKVYMVRLRNPLGRQEWSGPWSEISEEWQQLTASDRKNLGLVMSDDGEFWMSLEDFCRNFHKLNVCRNVNNPIFGRKELESVLGCWTVDDDPLMNRSGGCYNNRDTFLQNPQYIFTVPEDGHKVIMSLQQKDLRTYRRMGRPDNYIIGFELFKVEMNRKFRLHHLYIQERAGTSTYIDTRTVFLSKYLKKGNYVLVPTMFQHGRTSEFLLRIFSEVPVQLRELTLDMPKMSCWNLARGYPKVVTQITVHSAEDLEKKYANETVNPYLVIKCGKEEVRSPVQKNTVHAIFDTQAIFYRRTTDIPIIVQVWNSRKFCDQFLGQVTLDADPSDCRDLKSLYLRKKGGPTAKVKQGHISFKVISSDDLTEL

SEQ ID NO: 141 - DNA, 80 bp, Artificial
  synthetic
tcgtggatgtggcgctgaagatgctgcaagagcaactggcagaggtcgccgtgagtgccaagcgggaagccctgggtgcg

SEQ ID NO: 142 - DNA, 80 bp, Artificial
  synthetic
tggagaacagcgcctacagtattttggagataacggcagtggaggtgggcattgtggccatcaggggtctcttctccggg

SEQ ID NO: 143 - DNA, 80 bp, Artificial
  synthetic
tgtcacctggacgacacgggatggcatgtgggaggcattccaggacggagagaagctgggcactggggagaacctggccc

SEQ ID NO: 144 - DNA, 80 bp, Artificial
  synthetic
tcctgggcttccaggtgccattggggcccaggggacaccggggatctgcgacacctcagcctgccaaggagccgtgttag

SEQ ID NO: 145 - DNA, 80 bp, Artificial
  synthetic
gcatgaggggtcataaaggggctaaaggagaaattggtgaaccaggaagacaaggacacaagggtgaagaaggtgaccag

SEQ ID NO: 146 - DNA, 80 bp, Artificial
  synthetic
ccctctggatgagtccgagagagatggaggctctgaggaccaagtggaagacccagcactaagtgagcctggggaggaac

SEQ ID NO: 147 - DNA, 80 bp, Artificial
  synthetic
gactacgatgacacagacgatgacgaccctttcaaccctcaggaatccaagcgctttgtgcagtggcagtcgtctatctg

SEQ ID NO: 148 - DNA, 80 bp, Artificial
  synthetic
ctcaagaccagcaaaaacgactccgtcatccagcaactggctaccatcttcacccactgctatggcagcagtcccatccc

SEQ ID NO: 149 - DNA, 80 bp, Artificial
  synthetic
ctgtgatcaagtgctctgggcagacttcaagactttctgcttcctccactttccagtcaatcagtgactccctcctggct

SEQ ID NO: 150 - DNA, 80 bp, Artificial
  synthetic
ccagaatgtttccgtgctacactttgtgtcctgctgcaatgtgttctgtctgtccatccatctctgccctctgtaccgga

SEQ ID NO: 151 - DNA, 80 bp, Artificial
  synthetic
ctcattcaggtgatgtgctctatgaactccttcagcatattctgaagcagaggaaacctcggattcttttttcaccattc

SEQ ID NO: 152 - DNA, 80 bp, Artificial
  synthetic
tccttccaagctcctctcttctgggtcatgcaaagcagatcttggttgccgcagctacactgatgaactccacgcggtcg

SEQ ID NO: 153 - DNA, 80 bp, Artificial
  synthetic
cgtcagctacctgggcagcaagttcctgggaagcgacctggagagtgaggatgatgaggaactggtcgaggccttcctcc

SEQ ID NO: 154 - DNA, 80 bp, Artificial
  synthetic
ccacacccaagttctttgtcaggatctcttccaggaatgtctcgaggtaaatcaatgatcagctccctcagtatcatggg

SEQ ID NO: 155 - DNA, 80 bp, Artificial
  synthetic
tgctgaattccttgcctaccagtgtgagaagcatgtgctggtcatactgacggacatgagttcctatgcagaggccttgc

SEQ ID NO: 156 - DNA, 80 bp, Artificial
  synthetic
gtgcacctgcaacaggtgtacattttgcatctgtcagaacttcctcaactcagacttgctgcaatctgtaaagaacaaaa

SEQ ID NO: 157 - DNA, 80 bp, Artificial
  synthetic
tcaaccagtttgtgaacacagtgtctgcctcccctagaaccatcgtctcgtttctctcagttgccctcctgagtgaccag

SEQ ID NO: 158 - DNA, 80 bp, Artificial
  synthetic
ctgcgacgcggaagccaccttctcccagcgctgaaacttgatggctccgaacaccctcgaagcgcgccactcgcttcccc

SEQ ID NO: 159 - DNA, 80 bp, Artificial
  synthetic
cacagagaagtttgtctgcctggatgactcctttggccatgactgcagcttgacctgtgatgactgcaggaacggaggga

SEQ ID NO: 160 - DNA, 80 bp, Artificial
  synthetic
cttggtggcaatggctggctcctggatggccctgaggaggtgttacaagcagaggcgtgcagcaccacggaggatggggc

SEQ ID NO: 161 - DNA, 80 bp, Artificial
  synthetic
gctgtgattaacgagaactccaagtacaaggccgaccacaatggatgctgcaaaaacgttgactggggcaaaggattttt

SEQ ID NO: 162 - DNA, 80 bp, Artificial
  synthetic
aggacaagcagtggctgttttccaaactgcccgaggtcaagagcaccagcgagaggttcctgcaggacctggagcagcgg

SEQ ID NO: 163 - DNA, 80 bp, Artificial
  synthetic
cctgggcctggagaggccaccgagcctagccatgcggcattagctctagctctcactccctaatccgtccttcttagctg

SEQ ID NO: 164 - DNA, 80 bp, Artificial
  synthetic
agctactcatcaatgcccacgagcagcaaacccagcagctgaaactgtcccatgacagggaaagcaaggaaatgcgagca

SEQ ID NO: 165 - DNA, 80 bp, Artificial
  synthetic
aagctgctgaaggagggtcaccgcatggacaagcccagtaactgcaccaacgagctgtacatgatgatgcgggactgctg

SEQ ID NO: 166 - DNA, 80 bp, Artificial
  synthetic
tttgtttgtttcacttgtttccctcccagccccaaaccttttgttctctccgtgaaacttacctttccctttttctttct

SEQ ID NO: 167 - DNA, 80 bp, Artificial
  synthetic
gagggggagaccaaaatagcgctggagagagagaaggatgacatggaaaccaaacttctacatctggaagacgtcgtccg

SEQ ID NO: 168 - DNA, 80 bp, Artificial
  synthetic
ttggatgcttcaagcacctcagccctctgaactacaaaacagaagagcctgcaagtgacaaaggaagtgaggcagaggcc

SEQ ID NO: 169 - DNA, 80 bp, Artificial
  synthetic
ccccacatctcctgacagtgcttcatcagcttgtgggaacagttcagcaaccaaaccagacaaggatagcaaaaaagaaa

SEQ ID NO: 170 - DNA, 80 bp, Artificial
  synthetic
gacagagcaagacctctacgtgcgtctcatcgactccatgtccaaacaggccatcatctatgaggggcaggacaagaacc

SEQ ID NO: 171 - DNA, 80 bp, Artificial
  synthetic
tgagcagtgccaaacagcggcagctgtacaagaacagaggctttcttccactctctcatttcctgcccatgctgcccatg

SEQ ID NO: 172 - DNA, 80 bp, Artificial
  synthetic
ttctggaatgagcagtcaactaagttcatggaccagaaaaacagcctgtacttaatgccaatcctgcctgtaccctccag

SEQ ID NO: 173 - DNA, 80 bp, Artificial
  synthetic
aacaccagaaataacatgatccagaccaagccaacaggaacccagcaatcgaccaatacagctgtgactctgactggcta

SEQ ID NO: 174 - DNA, 80 bp, Artificial
  synthetic
gtcggagtgaggagatctcagagagtgaaagtgaggagaccaatgcaccaaaaaagaccaaaactgaggaactccctcgg

SEQ ID NO: 175 - DNA, 80 bp, Artificial
  synthetic
accagccatccacctcacagatcgcctacacctccctcagcctgccccactatggctcagccttcccctccatctcccgc

SEQ ID NO: 176 - DNA, 80 bp, Artificial
  synthetic
tcagacagtcattcgcaaaggtcccatttccatgaccaagaaccctctgaacctcccctgtcagaaggagctggtggggg

SEQ ID NO: 177 - DNA, 80 bp, Artificial
  synthetic
cgccctcctgctggtacctaatggggagacctcctggaccaacaccaaccatctcagcttgcaagtctggctcatgggcg

SEQ ID NO: 178 - DNA, 80 bp, Artificial
  synthetic
ccatgatagtggagttcatggccagcaagaagatgcagttggagtttcctccttccctcaattcccacgacaggctgcgg

SEQ ID NO: 179 - DNA, 80 bp, Artificial
  synthetic
agcaagattgcagtcaccggtactggtgcccatcctgccttcaagtacctggcccagacttctgggaaggagcccacctg

SEQ ID NO: 180 - DNA, 80 bp, Artificial
  synthetic
cgagtgcttcaacttcatccgcttcctgcagccctacaatgcctcccacctgtacgtctgtggcacctacgccttccagc

SEQ ID NO: 181 - DNA, 80 bp, Artificial
  synthetic
aattctaagctcttcaggatcaaatgtcgttcgtcctgtccagaatggcagcctgtggaggcacctgcaagaacaaagtg

SEQ ID NO: 182 - DNA, 80 bp, Artificial
  synthetic
caagctggattaacccatgggataaactttgcagtgtcaaaagttcagaagagtcctccagaacctgaaatcattaatca

SEQ ID NO: 183 - DNA, 80 bp, Artificial
  synthetic
ctgaggcccatgaaaagatcgagaagctcaaggacctgattgcttggcagattccttttctggccgaagggatcagaatc

SEQ ID NO: 184 - DNA, 80 bp, Artificial
  synthetic
acaaacagaactcccaggacttcatggatgagatttttcaggagctcgagaacttcagcttggagcaggaagaggaggac

SEQ ID NO: 185 - DNA, 80 bp, Artificial
  synthetic
tacttcaactacaagaagaggcagaacctcgatgagatcttgcagcagcacaagctgaagatggagaaggagaggaacgc

SEQ ID NO: 186 - DNA, 80 bp, Artificial
  synthetic
tgatgctgagctgattgtgaagaatatgttcaccaaccaggaccggaatggagatgggaaggtcacagctgaggaattta

SEQ ID NO: 187 - DNA, 80 bp, Artificial
  synthetic
tttgaggctgatctcaaggagaaacagattgagtcaagtgactatgacagctcttccagcaaaggcaaaaagaaaggccg

SEQ ID NO: 188 - DNA, 80 bp, Artificial
  synthetic
agggagtcaaaggggaaaaagtcttccagccatagcctgagtcataaagggaagaaactgagcagtgggaaaggtgtgag

SEQ ID NO: 189 - DNA, 80 bp, Artificial
  synthetic
tgcaatcgaggaagggactctagatggccttgaccactctgattttcaggatacagacattccctttgaggtgccactcc

SEQ ID NO: 190 - DNA, 80 bp, Artificial
  synthetic
ctctcgtgtgggacacaccctaccacaccgtctgggactgcgacttcagcactggcaagatcggctggttcctgggaggc

SEQ ID NO: 191 - DNA, 80 bp, Artificial
  synthetic
acccaggactgtgtgcagagttcccggacagattgaagtgctaagaggctttctagaggatgtggtgcctgatgccacct

SEQ ID NO: 192 - DNA, 80 bp, Artificial
  synthetic
aaacacaaggagatgctgccaaaatccttcatcaagctgctccgctccaaagtttccagcttcctgaggccctacaaata

SEQ ID NO: 193 - DNA, 80 bp, Artificial
  synthetic
gctggaggccaagatgaccatgctgactgtcatagagcagccagtacctccaacaccagctacccctgaggaccctgccc

SEQ ID NO: 194 - DNA, 80 bp, Artificial
  synthetic
aggaaactttcgcagattttctccgatgagaacaaccacctcagcagcagagagattcttttccaggaggaggccactga

SEQ ID NO: 195 - DNA, 80 bp, Artificial
  synthetic
gcccaacgtggtggtgaatggtgtgctccagggcctctacagcttcagcatcagcccagataaagcccagccaaaggcgg

SEQ ID NO: 196 - DNA, 80 bp, Artificial
  synthetic
gcagcacgtcctggcctctcagggcctggccatgtcccctttcggaagcctgttcccttacccctacacgtacatggccg

SEQ ID NO: 197 - DNA, 80 bp, Artificial
  synthetic
gtctggctgccgtcattgtcagcacagtgccatggacatgggaagacttgactgcacagccaatggttttcatgatgatt

SEQ ID NO: 198 - DNA, 80 bp, Artificial
  synthetic
taagtctggacactgccatcagggttgcattggctgtcgctgtgctcaaaactgtcattttgggactgctgtgcctcctc

SEQ ID NO: 199 - DNA, 80 bp, Artificial
  synthetic
tgcattaaaggaatttctttgcctgagaaaaagttggcaacctgtgaaacggttgacttttggctgaaggtgggagccgg

SEQ ID NO: 200 - DNA, 80 bp, Artificial
  synthetic
cttccgggaccagtgggaacgcagctgggtggcccagagctgcaagagctacgctatcccctgccctcacctccaggcgg

SEQ ID NO: 201 - DNA, 80 bp, Artificial
  synthetic
cagtatgcttgaaatctgggatgtggaagacccttccaatgcagctaaccctcccttatgtagcgtcctgctcgaagacg

SEQ ID NO: 202 - DNA, 80 bp, Artificial
  synthetic
ggccgagatgtagatgaatgccgtatgcttgctcacctgtgtgctcatggggagtgcatcaacagccttggctccttccg

SEQ ID NO: 203 - DNA, 80 bp, Artificial
  synthetic
gcagaaagagcatgaagagtacatgaagaatcttctcaaagtgggagggatccttgtcatgccactggaagagaagttga

SEQ ID NO: 204 - DNA, 80 bp, Artificial
  synthetic
ttttcagcttttcacatgtctggttttgcaccatcacagatttgcctgcaatggataacccagtgtttttggaattactt

SEQ ID NO: 205 - DNA, 80 bp, Artificial
  synthetic
gacactcacactttgtccctgactgactatgcttgtggttctcctccagttgatagagaaaaacaacccagcgaaggcgc

SEQ ID NO: 206 - DNA, 80 bp, Artificial
  synthetic
ggcatttatctgagcgttctgagcagaatcggagatcagaggaggctcatagagctgaacagttgcaggatgcggaggag

SEQ ID NO: 207 - DNA, 80 bp, Artificial
  synthetic
ctgaggcacctccagaacaagacctcatagccagcacggtggcaggtgtggtgaccacagtgatgggcagctcccagccc

SEQ ID NO: 208 - DNA, 80 bp, Artificial
  synthetic
ctcatcaccatcgaggagaagtccagtttcttggaaggtatgctctgctgaggaagtcaaaagaacggcaagggctggat

SEQ ID NO: 209 - DNA, 80 bp, Artificial
  synthetic
atgtcccactgcattgccatcttgaagatttgtcacactccgacagagaagcttgttgccatgacaatgggctctggggc

SEQ ID NO: 210 - DNA, 80 bp, Artificial
  synthetic
aagggtggtccaactgccaaagtcaagcaaggccacatcagcttcaaggttatttccagcgatgatctcactgagctcta
